(19) United States
(12) Patent Application Publication
(10) Pub. No.: US 2026/0217758 A1
(43) Pub. Date: Jul. 30, 2026

(54) BARCODED XTEN POLYPEPTIDES AND COMPOSITIONS THEREOF, AND METHODS FOR MAKING AND USING THE SAME

(71) Applicant: Amunix Pharmaceuticals, Inc., South San Francisco, CA (US)

(72) Inventors: Volker Schellenberger, Palo Alto, CA (US); Eric Johansen, Oakland, CA (US); Angela Henkensiefken, San Jose, CA (US)

(21) Appl. No.: 19/646,174

(22) Filed: Apr. 13, 2026

Related U.S. Application Data
(62) Division of application No. 17/776,478, filed on Nov. 13, 2020, now Pat. No. 12,617,815.
(60) Provisional application No. 62/934,980, filed on Nov. 13, 2019.

(51) Int. Cl. C07K 1/13; C07K 14/00; C12N 15/70; G01N 33/68

(52) U.S. Cl. CPC C07K 1/13; C07K 14/001; C12N 15/70; G01N 33/6848; C12N 2800/101; G01N 2333/95

(57) ABSTRACT

Disclosed herein are polypeptides comprising an extended recombinant polypeptide (XTEN) comprised of a plurality of overlapping sequence motifs and one or more barcode fragments releasable upon protease digestion and detectable from all other proteolytically releasable fragments. Certain embodiments of these polypeptides further comprise a biologically active polypeptide, wherein advantageous embodiments thereof comprise a releasable segment capable of proteolytic cleavage that cleaves the linkage between the XTEN polypeptide and the biologically active polypeptide. Methods of making and methods of using said polypeptides are also disclosed.

### RELATED APPLICATIONS

[0001] This application is a division of U.S. application Ser. No. 17/776,478 filed on May 12, 2022, which is a 35 U.S.C. § 371 filing of International Patent Application No. PCT/US2020/060378, filed Nov. 13, 2020, which claims priority to U.S. Provisional Patent Application Ser. No. 62/934,980 filed on Nov. 13, 2019, the entire disclosures of which are hereby incorporated herein by reference.

### SEQUENCE LISTING

[0002] The content of the electronic sequence listing (385477.xml; Size: 3,901,270 bytes; and Date of Creation: Oct. 10, 2025) is herein incorporated by reference in its entirety.

### BACKGROUND

[0003] A polypeptide can be produced in a manner that results in a mixture of polypeptides. The mixture of polypeptides can often include the full-length polypeptide, along with size variants (e.g., truncations) thereof. The presence of variants that differ in size from the desired full-length product can affect the biological behavior of a polypeptide drug substance, potentially affecting the safety and/or efficacy of the polypeptide drug substance. For example, protein-based prodrugs for cancer therapy can be engineered with a tumor-targeted activation mechanism. More specifically, the full-length therapeutic protein can be produced and administered in an inactive (non-cytotoxic) prodrug form, that is converted to the active drug by preferential removal of a portion of the prodrug polypeptide at the intended biological side (e.g., the tumor). Truncation variants of the full-length construct can lose protective sequences and become cytotoxic (active), thus “contaminating” the prodrug composition and producing a mixture having components that are unintentionally active outside the intended biological site. In some instances, such shorter length variants can pose a greater risk of immunogenicity, have less selective toxicity for tumor cells, or show a less desired pharmacokinetic profile (e.g., resulting in a narrowed therapeutic window) compared with the full-length protein, or deleteriously have unintended effects in a recipient outside the intended site (e.g. in healthy tissue). As a result, detection and quantification of protein structural variations can be important for assessing biological properties (e.g., clinical safety and pharmacologic efficacy) of biotherapeutics and in developing new biotherapeutics (e.g., with increased efficacy and reduced side effects). Existing techniques and methods for identifying and quantifying the amount of “contaminating” truncation products can include one or more drawbacks, such as being of limited sensitivity, ease, efficiency, or effectiveness.

### SUMMARY

[0004] Disclosed herein are polypeptides comprising an extended recombinant polypeptide (XTEN) that is comprised of a plurality of non-overlapping sequence motifs. In XTEN polypeptides of this invention, the plurality of non-overlapping sequence motifs comprise: a set of non-overlapping sequence motifs, wherein each of said sequence motifs is repeated at least twice in the XTEN polypeptide; and also a unique non-overlapping sequence motif that occurs only once within the XTEN polypeptide; wherein the polypeptide further comprises a first barcode fragment releasable from the polypeptide upon digestion by a protease. In said embodiments, the first barcode fragment is a portion of the XTEN that includes at least part of the sequence motif that occurs only once within the XTEN and differs in sequence and molecular weight from all other peptides fragments that are releasable from the polypeptide upon complete digestion of the polypeptide by the protease. Further, in XTEN embodiments of the invention provided herein, the barcode fragment does not include the N-terminal amino acid or the C-terminal amino acid of the polypeptide. As further disclosed herein, XTEN polypeptides of this invention are characterized as comprising at least 150 amino acids, more specifically 150-3000 amino acids in length. The amino acids comprising XTEN polypeptides of the invention are characterized wherein at least 90% of these residues are glycine (G), alanine (A), serine (S), threonine (T), glutamate (E), or proline (P), and the XTEN polypeptide comprises at least four of these amino acids (G, A, S, T, E, or P). In addition, XTEN polypeptides as provided herein comprise nonoverlapping sequence motifs that are 9 to 14 amino acid sequences in length and within each of said nonoverlapping motifs the sequence of G, A, S, T, E, or P amino acids is substantially randomized with respect to any other nonoverlapping sequence motif comprising the XTEN polypeptide.

[0005] In some embodiments, the barcode fragment does not include a glutamic acid that is immediately adjacent to another glutamic acid in the XTEN. In some embodiments, the barcode fragment has a glutamic acid at its C-terminus. In some embodiments, the barcode fragment has an N-terminal amino acid that is immediately preceded by a glutamic acid residue. In some embodiments, the glutamic acid residue that precedes the N-terminal amino acid is not immediately adjacent to another glutamic acid residue. In some embodiments, the barcode fragment does not include a glutamic acid residue at a position other than the C-terminus of the barcode fragment unless the glutamic acid is immediately followed by a proline. In some embodiments, the barcode fragment is located from 10 amino acids to 150 amino acids from either the N-terminus of the polypeptide or the C-terminus of the polypeptide.

[0006] In some embodiments, the sequence motifs of the set of non-overlapping sequence motifs are identified herein by SEQ ID NOs: 182-203 and 1715-1722. In some embodiments, the sequence motifs of the set of non-overlapping sequence motifs are identified herein by SEQ ID NOs: 186-189. In some embodiments, the set of non-overlapping sequence motifs comprise at least two, at least three, or all four of the sequence motifs SEQ ID NOs: 186-189.

[0007] In specific embodiments, polypeptides provided herein comprise an XTEN polypeptide as disclosed herein wherein the barcode fragment does not include the N-terminal amino acid or the C-terminal amino acid of the polypeptide; does not include a glutamic acid that is immediately adjacent to another glutamic acid in the XTEN; has a glutamic acid at its C-terminus; has an N-terminal amino acid that is immediately preceded by a glutamic acid residue; and is located 10 amino acids to 125 amino acids from either the N-terminus of the polypeptide or the C-terminus of the polypeptide.

[0008] In some of these specific embodiments, the glutamic acid residue that precedes the N-terminal amino acid is not immediately adjacent to another glutamic acid residue. In some of these specific embodiments, the barcode fragment does not include a glutamic acid residue at a position other than the C-terminus of the barcode fragment unless the glutamic acid is immediately followed by a proline.

[0009] In some embodiments, the XTEN polypeptides provided herein comprise a plurality of non-overlapping sequence motifs, wherein each said sequence motif is repeated at least twice in the XTEN polypeptide and is between 9 and 14 amino acids in length. In some embodiments, the sequence motifs of the set of non-overlapping sequence motifs are identified herein by SEQ ID NOs: 182-203 and 1715-1722. In some embodiments, the sequence motifs of the set of non-overlapping sequence motifs are identified herein by SEQ ID NOs: 186-189. In some embodiments, the set of non-overlapping sequence motifs comprises at least two, at least three, or all four of the sequence motifs SEQ ID NOs: 186-189. In some embodiments, at least 91%, 92%, 93%, 94%, 95%, 96%, 97%, 98%, 99% or 100% of the amino acid residues of the XTEN polypeptide are a combination of glycine (G), alanine (A), serine (S), threonine (T), glutamate (E) or proline (P), wherein the XTEN polypeptide comprises at least four of these amino acids (G, A, S, T, E, or P). In some embodiments, the XTEN is from 150 to 3000 amino acids in length. In some embodiments, the XTEN is from 150 to 1000 amino acids in length. In some embodiments, the polypeptide can be cleaved by a protease that cleaves on the C-terminal side of glutamic acid residues that are not followed by proline. In certain embodiments, the protease is a Glu-C protease.

[0010] In some embodiments of the XTEN polypeptides provided herein, the barcode fragment is located within 200, within 150, within 100, or within 50 amino acids of the N-terminus of the polypeptide. In some embodiments, the barcode fragment is located between 10 and 200, between 30 and 200, between 40 and 150, or between 50 and 100 amino acids from the N-terminus of the protein. In some embodiments, the barcode fragment is located within 200, within 150, within 100, or within 50 amino acids of the C-terminus of the polypeptide. In some embodiments, the barcode fragment is located between 10 and 200, between 30 and 200, between 40 and 150, or between 50 and 100 amino acids from the C-terminus of the protein. In some embodiments, the barcode fragment is at least 4 amino acids in length. In some embodiments, the barcode fragment is between 4 and 20, between 5 and 15, between 6 and 12, or between 7 and 10 amino acids in length. In some embodiments, the barcode fragment is identified herein by SEQ ID Nos: 8020-8030 (BAR001-BAR011).

[0011] In some embodiments, the polypeptide further comprises a second barcode fragment wherein the second barcode fragment is a portion of the XTEN and differs in sequence and molecular weight from all other peptides fragments that are releasable from the polypeptide upon complete digestion of the polypeptide by protease. In some embodiments, the polypeptide further comprises a third barcode fragment wherein the third barcode fragment is a portion of the XTEN and differs in sequence and molecular weight from all other peptides fragments that are releasable from the polypeptide upon complete digestion of the polypeptide by protease.

[0012] In some embodiments, the XTEN has at least 90%, at least 92%, at least 95%, at least 98%, at least 99% or 100% sequence identity to a sequence identified herein by SEQ ID NOs: 8001-8019. In some embodiments, the XTEN is at least 200, at least 250, at least 300, at least 350, at least 400, at least 450, or at least 500 amino acids in length.

[0013] In some embodiments, the polypeptide further comprises a biologically active polypeptide linked to the XTEN polypeptide (BPXTEN). In some embodiments, the XTEN polypeptide is linked to the biologically active polypeptide at the XTEN's amino or carboxyl terminus. In either configuration, the barcode fragment is located within a region of the XTEN that extends, as measured from the amino or carboxyl terminus linked to the biologically active polypeptide, between 5% and 50%, between 7% and 40%, or between 10% and 30% of the length of the XTEN.

[0014] In some embodiments, the BPXTEN polypeptide further comprises one or more reference fragments releasable from the polypeptide upon digestion by the protease, wherein the one or more reference fragments each comprise a portion of the biologically active polypeptide. In some embodiments, the one or more reference fragments is a single reference fragment that differs in sequence and molecular weight from all other peptide fragments that are releasable from the polypeptide upon digestion of the polypeptide by the protease. In some embodiments, said reference fragment comprises a peptide whose presence in a polypeptide mixture indicates its existence or integrity (i.e., that the protein has not been degraded or proteolytically cleaved).

[0015] In some embodiments, the BPXTEN polypeptide further comprises a first release segment (RS1) located between the XTEN and the biologically active polypeptide. In some embodiments, the RS1 comprises an amino acid sequence having at least 90%, 91%, 92%, 93%, 94%, 95%, 96%, 97%, 98%, 99% or 100% sequence identity to a sequence identified herein by any one of the sequences in Tables 4a-4h. In some embodiments, the biologically active polypeptide identified herein by any one or combination of the sequences in Tables 4a-4 h and 8a-8b.

[0016] In some embodiments, the BPXTEN polypeptide advantageously has a terminal half-life that is at least two-fold longer compared to the biologically active polypeptide not linked to any XTEN.

[0017] In some embodiments, the BPXTEN polypeptide advantageously is less immunogenic compared to the biologically active polypeptide not linked to any XTEN, wherein immunogenicity can be ascertained by measuring production of IgG antibodies that selectively bind to the biologically active polypeptide after administration of comparable doses to a human or animal.

[0018] In some embodiments, the BPXTEN polypeptide exhibits an apparent molecular weight factor under physiological conditions that is greater than about 6.

[0019] In some embodiments, the BPXTEN polypeptide further comprises a second XTEN polypeptide wherein the second XTEN polypeptide comprises an amino acid sequence having the same characteristics as set forth above and throughout this disclosure for the first XTEN component of these embodiments of the BPXTEN, and wherein the first XTEN polypeptide is located N-terminal of the biologically active polypeptide and the second XTEN polypeptide is located C-terminal of the biologically active polypeptide. In some embodiments, the second XTEN polypeptide comprises an amino acid sequence that differs from the amino acid sequence of the first XTEN comprising these embodiments of the BPXTEN. In certain embodiments the amino acid sequence of the second XTEN polypeptide is longer than the amino acid sequence of the first XTEN polypeptide.

[0020] In some embodiments, the BPXTEN polypeptide further comprises a second release segment (RS2) located between the biologically active polypeptide and the second XTEN polypeptide. In some embodiments, the RS1 of the first XTEN polypeptide and RS2 of the second XTEN polypeptide are identical in sequence. In some embodiments, the RS1 of the first XTEN polypeptide and RS2 of the second XTEN polypeptide are each a substrate for cleavage by multiple proteases at one, or two, or three, or more cleavage sites within each release segment sequence.

[0021] In some of these embodiments, the BPXTEN polypeptide comprises a further barcode fragment that is a portion of the second XTEN polypeptide and differs in sequence and molecular weight from all other peptides fragments that are releasable from the polypeptide upon complete digestion of the polypeptide by protease. In some of these embodiments, the further barcode fragment does not include the C-terminal amino acid of the polypeptide. In some of these embodiments, the further barcode fragment comprises a glutamic acid residue at its C-terminus. In some of these embodiments, the further barcode fragment of the second XTEN polypeptide is located within 200, within 150, within 100, or within 50 amino acids of the C-terminus of the second XTEN component of the BPXTEN polypeptide. In some of these embodiments, the further barcode fragment of the second XTEN polypeptide is located at a location that is between 10 and 200, between 30 and 200, between 40 and 150, or between 50 and 100 amino acids from the C-terminus of the second XTEN component of the BPXTEN polypeptide. In some of these embodiments, the further barcode fragment is between 4 and 20, between 5 and 15, between 6 and 12, or between 7 and 10 amino acids in length. In some of these embodiments, the further barcode fragment is identified herein by SEQ ID Nos: 8020-8030 (BAR001-BAR011).

[0022] In some embodiments, the second XTEN polypeptide further comprises a set of barcode fragments that includes the further barcode fragment and at least one additional barcode fragment, wherein each barcode fragment of the set of barcode fragments differs in sequence and molecular weight from all other peptides fragments that are releasable from the BPXTEN polypeptide upon complete digestion of the polypeptide by the protease. In some embodiments, the second XTEN polypeptide is identified by SEQ ID NOs: 8001-8019. In some embodiments, the further barcode fragment does not include a glutamic acid residue that is immediately adjacent to another glutamic acid residue in the polypeptide.

[0023] In some embodiments, at least 91%, 92%, 93%, 94%, 95%, 96%, 97%, 98%, 99% or 100% of the amino acid residues of the second XTEN polypeptide are a combination of glycine (G), alanine (A), serine (S), threonine (T), glutamate (E) and proline (P), wherein the XTEN polypeptide comprises at least four of these amino acids (G, A, S, T, E, or P). In some embodiments, the sum of the total number of amino acids in the first XTEN polypeptide and the total number of amino acids in the second XTEN polypeptide is at least 300, at least 350, at least 400, at least 500, at least 600, at least 700, or at least 800 amino acids. In some embodiments, the second XTEN polypeptide comprises a plurality of non-overlapping sequence motifs, wherein each of said sequence motifs is repeated at least two times in the second XTEN polypeptide sequence and is between 9 and 14 amino acids in length.

[0024] In some embodiments, for the second XTEN polypeptide, the sequence motifs of the plurality of non-overlapping sequence motifs are identified herein by SEQ ID NOs: 182-203 and 1715-1722. In some embodiments, the sequence motifs of the plurality of non-overlapping sequence motifs are identified herein by SEQ ID NOs: 186-189. In some embodiments, for the second XTEN polypeptide, the plurality of non-overlapping sequence motifs comprise at least two, at least three, or all four of the following motifs: SEQ ID NOs: 186-189. In some embodiments, the second XTEN polypeptide is from 150 to 3000 amino acids in length. In some embodiments, the second XTEN polypeptide is from 150 to 1000 amino acids in length. In some embodiments, the second XTEN polypeptide has at least 90%, at least 92%, at least 95%, at least 98%, at least 99% or 100% sequence identity to sequence identified herein by SEQ ID NOs: 8001-8019. In some embodiments, the second XTEN polypeptide is at least 200, at least 250, at least 300, at least 350, at least 400, at least 450, or at least 500 amino acids in length.

[0025] In particular embodiments, the BPXTEN polypeptides provided herein comprise a first XTEN polypeptide comprising a first RS sequence proximal but not comprising the C-terminus of the polypeptide, covalently linked to a first and second biologically active polypeptide covalently linked in tandem, wherein a second XTEN polypeptide is covalently linked to the C-terminus of the tandemly linked biologically active polypeptides, wherein the second XTEN polypeptide comprises a second RS sequence proximal to but not comprising the N-terminus of the second XTEN polypeptide, wherein the first and second RS sequences can be the same or different. In particular embodiments, the second XTEN polypeptide comprises an amino acid sequence that is longer than the amino acid sequence of the first XTEN polypeptide. In certain embodiments the first or second biologically active protein or both comprises a specific binding protein, in certain embodiments wherein the specific binding protein specifically binds to an antigen or agonist expressed at a desired biological site. In particular embodiments the desired biological site is a tumor and the antigen is a tumor-specific antigen. In particular embodiments the first and second biologically active polypeptide are different, including but not limited to have different specific binding affinities.

[0026] Further disclosed herein is a nucleic acid comprising a polynucleotide encoding a polypeptide such as any XTEN or BPXTEN polypeptide disclosed herein or the reverse complement of said polynucleotide.

[0027] Also disclosed herein is an expression vector comprising any polynucleotide sequence such disclosed herein and a regulatory sequence operably linked to the polynucleotide sequence that regulates expression or other biological activity of said polynucleotide.

[0028] Disclosed herein is a host cell comprising an expression vector as disclosed herein. In some embodiments, the host cell is a prokaryote. In some of these embodiments, the host cell is E. coli. In some alternative embodiments, the host cell is a mammalian cell.

[0029] Additionally disclosed herein is a pharmaceutical composition comprising a polypeptide as disclosed herein and one or more pharmaceutically acceptable excipients. In some embodiments, the pharmaceutical composition is formulated for administration to an animal and in particular a human, wherein said administration can be by any therapeutically effective administration route Pharmaceutical compositions as disclosed herein can be prepared and used in any formulation known in the art and particularly adapted to administration route, site, and intended effect on the human or animal.

[0030] Disclosed herein is use of a polypeptide as disclosed herein and particularly a BPXTEN polypeptide in the preparation of a medicament for the treatment of a disease, disorder, or condition in a human or animal. In some embodiments, the disease, disorder, or condition can be cancer

[0031] Disclosed herein is a method of treating a disease in a human or animal human or animal as disclosed hereinabove and throughout this disclosure, the method comprising administering to the human or animal in need thereof one or more therapeutically effective doses of a pharmaceutical composition. In some embodiments, the pharmaceutical composition is administered to the human or animal as one or more therapeutically effective doses administered on a clinically appropriate schedule daily, weekly, monthly, or annually and at a clinically appropriate dose

[0032] Disclosed herein is a mixture comprising a plurality of polypeptides, particularly XTEN and BPXTEN polypeptides as disclosed herein of varying length, the mixture comprising:
[0033] a first set of polypeptides, wherein each polypeptide of the first set of polypeptides comprises a barcode fragment that is releasable from the polypeptide by digestion with a protease and has a sequence and molecular weight that differs from the sequence and molecular weight of all other fragments that are releasable from the first set of polypeptides; and
[0034] a second set of polypeptides lacking the barcode fragment of the first set of polypeptides;
[0035] wherein both the first set of polypeptides and the second set of polypeptides each comprise a reference fragment that is common to first set of polypeptides and the second set of polypeptides and produced by digestion with the protease; and
[0036] wherein the ratio of the first set of polypeptides to polypeptides comprising the reference fragment is greater than 0.7.

[0037] In some embodiments, ratio of the first set of polypeptides to polypeptides comprising the reference fragment is greater than 0.8, 0.9, 0.95, or 0.98. In some embodiments, the reference fragment occurs no more than once in each polypeptide of the first set of polypeptides and the second set of polypeptides. In some embodiments, the protease is a protease that cleaves on the C-terminal side of glutamic acid residues. In some embodiments, barcode release from polypeptides comprising the first set of polypeptides is facilitated by pepsin, elastase, thermolysin, or Glu-C proteases. In some embodiments, barcode release is facilitated by Glu-C protease. In some embodiments, the protease is not trypsin. In some embodiments, the polypeptides of varying lengths comprise polypeptides comprising at least one XTEN polypeptide as set forth herein.

[0038] In some embodiments, the first set of polypeptides comprises a full-length polypeptide, wherein the barcode fragment is a portion of the full-length polypeptide. In some embodiments, the full-length polypeptide is any polypeptide disclosed herein and particularly XTEN and BPXTEN polypeptides. In some embodiments, the barcode fragment does not comprise either the N-terminal amino acid or C-terminal amino acid of the full-length polypeptide. In some embodiments, the mixture of polypeptides of varying lengths differ from one another due to N-terminal truncation, C-terminal truncation, or both N- and C-terminal truncation of a full-length polypeptide.

[0039] Disclosed herein is a method for assessing, in a mixture comprising polypeptides of varying length, and in particular XTEN and BPXTEN polypeptides as disclosed herein, a relative amount of a first set of polypeptides in the mixture to a second set of polypeptides in the mixture, wherein each polypeptide of the first set of polypeptides shares a barcode fragment that occurs once and only once in the polypeptide and each polypeptide of the second set of polypeptides lacks the barcode fragment that is shared by polypeptides of the first set, wherein individual polypeptides of both the first set of polypeptides and the second set of polypeptides each comprises a reference fragment, the method comprising:
[0040] contacting the mixture with a protease to produce a plurality of proteolytic fragments that result from cleavage of the first set of polypeptides and the second set of polypeptides, wherein the plurality of proteolytic fragments comprise a plurality of reference fragments and a plurality of barcode fragments; and
[0041] determining a ratio of the amount of barcode fragments to the amount of reference fragments, thereby assessing the relative amounts of the first set of polypeptides to the second set of polypeptides.

[0042] In some embodiments, the reference fragment occurs no more than once in each polypeptide of the first set of polypeptides and the second set of polypeptides.

[0043] In some embodiments, the protease cleaves the polypeptides of varying length on the C-terminal side of glutamic acid residues that are not followed by a proline residue. In some embodiments, the protease is a Glu-C protease. In some embodiments, the protease is not trypsin. In some embodiments, determining a ratio of the amount of barcode fragments to the amount of reference fragments comprises quantifying barcode fragments and reference fragments from the mixture after the mixture of polypeptides has been contacted with the protease. In some embodiments, the barcode fragments and the reference fragments are identified based their respective masses. In some embodiments, the barcode fragments and the reference fragments are identified via mass spectrometry. In some embodiments, the barcode fragments and reference fragments are identified via liquid chromatography-mass spectrometry (LC-MS). In some embodiments, determining a ratio of the barcode fragments to the reference fragments comprises isobaric labeling or stable isotope labeling. In some embodiments, determining a ratio of the barcode fragments to the reference fragments comprises spiking the mixture with one or both of an isotope-labeled reference fragment and an isotope labeled barcode fragment.

[0044] In some of these embodiments, the polypeptides of varying length comprise a full-length polypeptide and truncated fragments thereof. In some of these embodiments, the mixture of polypeptides of varying lengths differ from one another due to N-terminal truncation, C-terminal truncation, or both N- and C-terminal truncation of a full-length polypeptide. In some of these embodiments, the ratio of the amount of barcode fragments to reference fragments is greater than 0.5, 0.6, 0.7, 0.8, 0.9, 0.95, 0.98, or 0.99.

[0045] Disclosed herein is a mixture comprising a plurality of polypeptides of varying length, the mixture comprising a first set of polypeptides, wherein each polypeptide of the first set of polypeptides comprises a barcode fragment that is releasable from the polypeptide by digestion with a protease and has a sequence and molecular weight that differs from the sequence and molecular weight of all other fragments that are releasable from the first set of polypeptides. Said embodiment also includes a second set of polypeptides lacking the barcode fragment of the first set of polypeptides, wherein both the first set of polypeptides and the second set of polypeptides each comprise a reference fragment that is common to first set of polypeptides and the second set of polypeptides and releasable by digestion with the protease. In said embodiment the number of reference fragments quantified in the polypeptide mixture after protease digestion is equal to the sum of the number of the first and second set of polypeptides in the mixture, and the number of barcode fragments quantified in the polypeptide mixture after protease digestion is equal to the number of the first set of polypeptides in the mixture. In said embodiment the first set of polypeptides comprises one reference fragment the ratio of the first set of polypeptides to polypeptides in the mixture comprising the reference fragment is greater than 0.7.

[0046] In some embodiments the mixture has a ratio of the first set of polypeptides to polypeptides comprising the reference fragment greater than 0.8, 0.9, or 0.95.

[0047] In a particular embodiment the reference fragment occurs no more than once in each polypeptide of the first set of polypeptides and the second set of polypeptides. In alternative embodiments the reference fragment occurs twice in each polypeptide of the first set of polypeptides and the second set of polypeptides.

[0048] In some embodiments the first set of polypeptides comprises a full-length polypeptide, wherein the barcode fragment is a portion of the full-length polypeptide.

[0049] In some embodiments the full-length polypeptide includes the polypeptides disclosed herein.

[0050] In a particular embodiment the mixture barcode fragment does not comprise the N-terminal amino acid and C-terminal amino acid of the full-length polypeptide.

[0051] In some embodiments the mixture contains polypeptides of varying lengths that differ from one another due to N-terminal truncation, C-terminal truncation, or both N-terminal and C-terminal truncation of a full-length polypeptide.

[0052] In some embodiments the reference fragment occurs no more than once in each polypeptide of the first set of polypeptides and the second set of polypeptides. In an alternative embodiment the number of reference fragments in the first set of polypeptides can differ from the number of reference fragments in the second set of polypeptides but the number thereof in each polypeptide of each set must be the same.

[0053] In one particular embodiment, each of the reference fragments in the polypeptides of the mixture has a sequence and molecular weight that differs from the sequence and molecular weight of all other fragments.

[0054] Disclosed herein is a mixture comprising a plurality of polypeptides of varying length, the mixture comprising a first set of polypeptides, wherein each polypeptide of the first set of polypeptides comprises a barcode fragment that is releasable from the polypeptide by digestion with a protease and has a sequence and molecular weight that differs from the sequence and molecular weight of all other fragments that are releasable from the first set of polypeptides. The mixture further comprises a second set of polypeptides lacking the barcode fragment of the first set of polypeptides wherein both the first set of polypeptides and the second set of polypeptides each comprise a reference fragment that is common to first set of polypeptides and the second set of polypeptides and releasable by digestion with the protease. The ratio of the first set of polypeptides to polypeptides in the mixture has the formula:

[barcode-containing polypeptides]/[(reference peptide-containing polypeptides)×N]

where N is the number of occurrences of the reference peptide that is released from each polypeptide in the mixture, and wherein when the first set of polypeptides comprises one reference fragment the ratio of the first set of polypeptides to polypeptides in the mixture comprising the reference fragment is greater than 0.7.

[0055] In a particular embodiment the ratio of the first set of polypeptides to polypeptides comprising the reference fragment is greater than 0.8, 0.9, or 0.95.

[0056] In some embodiments the reference fragment in the occurs no more than once in each polypeptide of the first set of polypeptides and the second set of polypeptides.

[0057] In some embodiments the reference fragment occurs twice in each polypeptide of the first set of polypeptides and the second set of polypeptides.

[0058] In a particular embodiment the first set of polypeptides comprises a full-length polypeptide, wherein the barcode fragment is a portion of the full-length polypeptide.

[0059] In some embodiments the full-length polypeptide includes the polypeptides disclosed herein. In a particular embodiment the barcode fragment does not comprise the N-terminal amino acid and C-terminal amino acid of the full-length polypeptide.

[0060] In some embodiments the mixture of polypeptides of varying lengths differ from one another due to N-terminal truncation, C-terminal truncation, or both N-terminal and C-terminal truncation of a full-length polypeptide.

[0061] In some embodiments the reference fragment occurs no more than once in each polypeptide of the first set of polypeptides and the second set of polypeptides. In further embodiments the number of reference fragments in the first set of polypeptides can differ from the number of reference fragments in the second set of polypeptides but the number thereof in each polypeptide of each set must be the same. In some embodiments the reference fragments in the polypeptides of the mixture has a sequence and molecular weight that differs from the sequence and molecular weight of all other fragments.

[0062] Disclosed herein is a method of detecting sequence integrity of polypeptides comprising the first set of polypeptides in the mixture disclosed herein, the method comprising the steps of digesting the mixture of polypeptides with a protease that releases the barcode fragment and the reference fragment from the first set of polypeptides and releases the reference fragment from the second set of polypeptides, and determining a ratio of the barcode fragments from the first set of polypeptides to the reference fragments from the first and second set of polypeptides. In a particular embodiment the sequence integrity of polypeptides of the first set of polypeptides are detected by a comparison of the ratio of the fragments to the expected ratio of the fragments based on the number of barcode fragments and reference fragments in polypeptides comprising the first and second set of polypeptides.

[0063] The methods contemplated herein are readily amenable to qualitative and quantitative analysis of the polypeptides that contain the barcodes and/or reference fragments, for example by use of LC/MS. In one particular embodiment, the LC/MS is quantitative and detects an isotopically distinguishable amount of bar code fragments, reference fragments, or both. In exemplary such methods, the mixture of polypeptides is spiked with a known amount of a “standard material” to facilitate such analysis. For example, such a standard material is one which comprises an isotopically-labelled version of said mixture of a plurality of polypeptides of varying length that are to be analyzed. This isotopically labelled standard may be added to the mixture as a complete sequence prior to digestion by said protease. Alternatively, the test sample of the mixture of polypeptides of varying length and the isotopically labelled standard material are digested by the protease in separate reactions and the protease-digested isotopically labelled standard material is added to the test sample prior to analysis by LC/MS. The methods of the present invention, further comprise quantitating the amount of bar code fragments, reference fragments or both from the test sample by comparison to the quantification of the detected isotopically distinguishable amounts of bar code fragments, reference fragments, or both.

[0064] Variations and modifications of these embodiments will occur to those of skill in the art after reviewing this disclosure. The foregoing features and aspects can be implemented, in any combination and sub-combinations (including multiple dependent combinations and sub-combinations), with one or more other features described herein. The various features described or illustrated above, including any components thereof, can be combined or integrated in other embodiments. Moreover, certain features can be omitted or not implemented.

### INCORPORATION BY REFERENCE

[0065] All publications, patents, and patent applications mentioned in this specification are herein incorporated by reference to the same extent as if each individual publication, patent, or patent application was specifically and individually indicated to be incorporated by reference.

### BRIEF DESCRIPTION OF THE DRAWINGS

[0066] Various features of this disclosure are set forth with particularity in the appended claims. A better understanding of the features and advantages of the present disclosure can be obtained by reference to the following detailed description that sets forth illustrative embodiments, in which the principles of the invention are utilized, and the accompanying drawings of which:

[0067] FIG. 1 depicts a mixture of XTENylated Protease-Activated T Cell Engager (“XPAT”) polypeptides having varying lengths of XTEN polypeptides. The full-length XPAT (top) comprises a 288 amino acid-long XTEN polypeptide at the N-terminus and a 864 amino acid-long XTEN polypeptide at the C-terminus. Various truncations can occur in the XPAT in one or both of the N- and C-terminal XTEN polypeptides, for example, during fermentation, purification or other steps in product preparation. While products having limited truncations (truncations near a portion of the XTEN polypeptide distal from the Protease-Activated T Cell Engager linked thereto) can function in a manner similar to the full-length construct, severe truncations (truncations closer to a portion of the XTEN polypeptide proximal from Protease-Activated T Cell Engager linked thereto) can possess significantly different pharmacological properties from their full-length counterparts. The presence of truncations poses a challenge for quantifying the pharmacologically efficacious and inefficacious variants in an XPAT product. As illustrated in FIG. 1 using the full-length XPAT, each XTEN polypeptide has a proximal end and a distal end, wherein the proximal end is located, relative to the distal end, closer to the biologically active polypeptide (e.g., T-cell engager, cytokine, monoclonal antibody (mAb), antibody fragment, or other protein that is XTENylated). Depending on linkage orientation the proximal or distal ends of the XTEN polypeptide can correspond to the XTEN polypeptide's N-terminus or C-terminus.

[0068] FIG. 2 depicts a mixture of XPAT polypeptides having varying lengths of barcoded XTEN polypeptides. In the full-length XPAT (top), the 288 amino acid-long N-terminal XTEN polypeptide contains three cleavably fused barcode sequences, “NA,” “NB,” and “NC” (from distal end to proximal end), and the 864 amino acid-long C-terminal XTEN polypeptide contains three cleavably fused barcode sequences, “CC,” “CB,” and “CA” (from proximal end to distal end). Each barcode is located to indicate a pharmacologically relevant length of the corresponding XTEN polypeptide. For example, minor N-terminal truncation products of the XPAT, lacking the barcode “NA” but having the more proximal barcodes “NB” and “NC,” can show substantially the same pharmacological properties as the full-length construct. In contrast, major N-terminal truncation products of the XPAT, e.g., lacking all three barcodes on the N-terminus, can discernibly differ in pharmacological activity from the full-length construct. A unique proteolytically cleavable sequence is identified from the biologically active polypeptide (here, the tandem scFvs that comprise the active portion of the T-cell engager) of the XPAT. Due to its presence in all the length variants of the XPAT (including full-length XPAT, minor truncations, and major truncations thereof), the unique proteolytically cleavable sequence can be used as a reference for quantifying the amounts of various truncation products in relation to the total amount of the biologically active protein.

[0069] FIG. 3 illustrates a potential design for a barcoded XTEN polypeptide by inserting a barcode-generating sequence into a general-purpose (or regular) XTEN polypeptide. The exemplary general-purpose (or regular) XTEN polypeptide (top) comprises non-overlapping 12-mer motifs in the sequence “BCDABDCDABDCBDCDABDCB,” wherein the sequence motifs “A,” “B,” “C,” and “D” occur 3, 6, 5, and 7 times, respectively. Glu-C protease digest of the exemplary general-purpose XTEN polypeptide (upper panel) does not yield unique peptides except both termini (“NT” and “CT”). The insertion of a barcode-generating sequence, “X” (e.g., a unique 12-mer), into the XTEN polypeptide results in a unique proteolytically cleavable sequence (or barcode sequence) that does not occur anywhere else in the XTEN polypeptide. The barcode-generating sequence, “X,” can be located wherein the resulting barcode marks a pharmacologically-relevant length of the XTEN polypeptide. For example, an XTEN polypeptide lacking a barcode can functionally differ from the corresponding XTEN polypeptide with the barcode. One of ordinary skill in the art will understand that the barcode-generating sequence (“X”) can be the barcode sequence itself. Alternatively, the barcode-generating sequence (“X”) can differ from the resulting barcode sequence. For example, the barcode sequence can overlap with and, thus, contain part of the preceding or following 12-mer motif.

[0070] FIGS. 4A-4B illustrate the quantification of the level of truncation for an N-terminal XTEN polypeptide. FIG. 4A demonstrates that a barcoded XTEN polypeptide (bottom panel) can be constructed by replacing a sequence motif in a general-purpose XTEN polypeptide (top panel) (e.g., the third sequence motif from the N-terminus, “D”) with a barcode-generating motif, “X”; and, in this example, the barcode-generating motif (“X”) is itself the unique proteolytically cleavable barcode sequence. As shown in the bottom panel in FIG. 4A, the barcode is located wherein all the severe truncation forms of the XTEN polypeptide lack the barcode, and all the limited truncation forms of the XTEN polypeptide contain the barcode. FIG. 4B illustrates the relative abundance of various cleavage products in two different mixtures of XPAT. In one of the mixtures, the barcode is present in 99% of the constructs that contain the biologically active protein. In the other one of the mixtures, 13% of the constructs are lack a barcode. FIGS. 4A-4B illustrate the use of barcoded XTEN polypeptide to differentiate between two polypeptide mixtures having substantially similar average molecular weights but discernibly different pharmacological activities.

[0071] FIG. 5A illustrates analytical size exclusion chromatography (SEC) of XPAT protein and detection of full-length protein and truncated derivatives thereof. The Synthetic protein+truncates fraction includes fragments as large as intact synthetic protein.

[0072] FIG. 5B illustrates the abundance of Barcode peptides in XPAT preparations as detected by mass spectrometry. Each measurement is the XIC area of N-Barcode SGPGSTPAE (SEQ ID No. 8029) and, C-Barcode GSAPGTE (SEQ ID No. 8023) normalized to a 400 nM Spike of its corresponding heavy isotope labeled Synthetic peptide.

[0073] The patent or application file contains at least one drawing executed in color. Copies of this patent or patent application publication with color drawings will be provided by the Office upon request and payment of the necessary fee.

### Terminology

[0074] As used herein, the following terms have the meanings ascribed to them unless specified otherwise.

[0075] As used in the specification and claims, the singular forms “a,” “an,” and “the” include plural references unless the context clearly dictates otherwise. For example, the term “a cell” includes a plurality of cells, including mixtures thereof.

[0076] The terms “polypeptide,” “peptide,” and “protein” are used interchangeably herein to refer to polymers of amino acids of any length. The polymer can be linear or branched, it can comprise modified amino acids, and it can be interrupted by non-amino acids. The terms also encompass an amino acid polymer that has been modified, for example, by disulfide bond formation, glycosylation, lipidation, acetylation, phosphorylation, or any other manipulation, such as conjugation with a labeling component.

[0077] As used herein the term “amino acid” refers to either natural and/or unnatural or synthetic amino acids, including but not limited to glycine and both the D or L optical isomers, and amino acid analogs and peptidomimetics. Standard single or three letter codes are used to designate amino acids.

[0078] A “host cell” includes an individual cell or cell culture which can be or has been a recipient for the human or animal vectors. Host cells include progeny of a single host cell. The progeny are not necessarily completely identical (in morphology or in genomic of total DNA complement) to the original parent cell due to naturally occurring or genetically engineered variation.

[0079] A “chimeric” protein contains at least one polypeptide comprising regions in a different position in the sequence than that which occurs in nature. The regions can normally exist in separate proteins and are brought together in the fusion polypeptide; or they can normally exist in the same protein but are placed in a new arrangement in the fusion polypeptide. Said proteins can be described as “conjugated,” “linked,” “fused,” or “fusion” proteins; these terms are used interchangeably herein and refer to the joining together of two more polypeptide sequences by whatever means including chemical conjugation or recombinant means. A chimeric protein can be created, for example, by chemical synthesis, or by creating and translating a polynucleotide in which the peptide regions are encoded in the desired relationship.

[0080] The terms “polynucleotides,” “nucleic acids,” “nucleotides,” and “oligonucleotides” are used interchangeably and refer to a polymeric form of nucleotides of any length, either deoxyribonucleotides or ribonucleotides, or analogs thereof. Polynucleotides can have any three-dimensional structure, and can perform any function, known or to be discovered or developed. A polynucleotide can comprise modified nucleotides, such as methylated nucleotides and nucleotide analogs. If present, modifications to the nucleotide structure can be imparted before or after assembly of the polymer. The sequence of nucleotides can be interrupted by non-nucleotide components. A polynucleotide can be further modified after polymerization, such as by conjugation with a labeling component.

[0081] The term “complement of a polynucleotide” denotes a polynucleotide molecule having a complementary base sequence and reverse orientation as compared to a reference sequence, wherein it could hybridize with a reference sequence with complete fidelity.

[0082] As used herein, polynucleotides having “homology” or that are “homologous” are those which hybridize under stringent conditions as defined herein and have at least 70%, preferably at least 80%, more preferably at least 90%, more preferably 95%, more preferably 97%, more preferably 98%, and even more preferably 99% sequence identity to those sequences.

[0083] The terms “percent identity” and “% identity,” as applied to polynucleotide sequences, refer to the percentage of residue matches between at least two polynucleotide sequences aligned using a standardized algorithm. Such an algorithm can insert, in a standardized and reproducible way, gaps in the sequences being compared in order to optimize alignment between two sequences, and therefore achieve a more meaningful comparison of the two sequences. Percent identity can be measured over the length of an entire defined polynucleotide sequence, for example, as defined by a particular SEQ ID number, or can be measured over a shorter length, for example, over the length of a fragment taken from a larger, defined polynucleotide sequence, for instance, a fragment of at least 45, at least 60, at least 90, at least 120, at least 150, at least 210 or at least 450 contiguous residues. Such lengths are exemplary only, and it is understood that any fragment length supported by the sequences shown herein, in the tables, figures or Sequence Listing, can be used to describe a length over which percentage identity can be measured.

[0084] “Percent (%) amino acid sequence identity,” with respect to the polypeptide sequences identified herein, is defined as the percentage of amino acid residues in a query sequence that are identical with the amino acid residues of a second, reference polypeptide sequence or a portion thereof, after aligning the sequences and introducing gaps, if necessary, to achieve the maximum percent sequence identity, and not considering any conservative substitutions as part of the sequence identity. Alignment for purposes of determining percent amino acid sequence identity can be achieved in various ways that are within the skill in the art, for instance, using publicly available computer software such as BLAST, BLAST-2, ALIGN or Megalign (DNASTAR) software. Those skilled in the art can determine appropriate parameters for measuring alignment, including any algorithms needed to achieve maximal alignment over the full length of the sequences being compared. Percent identity can be measured over the length of an entire defined polypeptide sequence, for example, as defined by a particular SEQ ID number, or can be measured over a shorter length, for example, over the length of a fragment taken from a larger, defined polypeptide sequence, for instance, a fragment of at least 15, at least 20, at least 30, at least 40, at least 50, at least 70 or at least 150 contiguous residues. Such lengths are exemplary only, and it is understood that any fragment length supported by the sequences shown herein, in the tables, figures or Sequence Listing, can be used to describe a length over which percentage identity can be measured.

[0085] As used herein, “repetitiveness” of an XTEN polypeptide amino acid sequence refers to 3-mer repetitiveness and can be measured by computer programs or algorithms or by other means known in the art. The 3-mer repetitiveness of an XTEN polypeptide amino acid sequence can be assessed by determining the number of occurrences of the overlapping 3-mer sequences within the polypeptide. For example, a polypeptide of 200 amino acid residues has 198 overlapping 3-amino acid sequences (3-mers), but the number of unique 3-mer sequences depends on the amount of repetitiveness within the sequence. A score can be generated (hereinafter “subsequence score”) that is reflective of the degree of repetitiveness of the 3-mers in the overall polypeptide sequence. In the context of the present invention, “subsequence score” means the sum of occurrences of each unique 3-mer frame across a 200 consecutive amino acid sequence of the polypeptide divided by the absolute number of unique 3-mer subsequences within the 200 amino acid sequence. Examples of such subsequence scores derived from the first 200 amino acids of repetitive and non-repetitive polypeptides are presented in Example 73 of International Patent Application Publication No. WO 2010/091122 A1, which is incorporated by reference in its entirety. In some embodiments, the present invention provides BPXTEN polypeptides each comprising at least one XTEN polypeptide in which the XTEN polypeptide amino acid sequence can have a subsequence score less than 16, or less than 14, or less than 12, or more preferably less than 10.

[0086] The term “substantially non-repetitive XTEN polypeptide amino acid sequence,” as used herein, refers to an XTEN polypeptide, wherein there are few or no instances of four contiguous amino acids in the XTEN polypeptide amino acid sequence that are identical amino acid types and wherein the XTEN polypeptide amino acid sequence has a subsequence score (defined in the preceding paragraph herein) of 12, or 10 or less or that there is not a pattern in the order, from N- to C-terminus, of the sequence motifs that constitute the polypeptide sequence.

[0087] As set forth herein, the term “non-overlapping sequence motifs” includes sequence motifs that are completely non-overlapping as well as sequence motifs that are only partially non-overlapping, provided that said partially non-overlapping sequence motifs are not completely overlapping.

[0088] A “vector” is a nucleic acid molecule, preferably self-replicating in an appropriate host, which transfers an inserted nucleic acid molecule into and/or between host cells. The term includes vectors that function primarily for insertion of DNA or RNA into a cell, replication of vectors that function primarily for the replication of DNA or RNA, and expression vectors that function for transcription and/or translation of the DNA or RNA. Also included are vectors that provide more than one of the above functions. An “expression vector” is a polynucleotide which, when introduced into an appropriate host cell, can be transcribed and translated into a polypeptide(s). An “expression system” usually connotes a suitable host cell comprised of an expression vector that can function to yield a desired expression product.

[0089] The term “t_{1/2}” as used herein means the terminal half-life calculated as ln(2)/Kₑₗ. Kₑₗ is the terminal elimination rate constant calculated by linear regression of the terminal linear portion of the log concentration vs. time curve. Half-life typically refers to the time required for half the quantity of an administered substance deposited in a living organism to be metabolized or eliminated by normal biological processes. The terms “t_{1/2}”, “terminal half-life”, “elimination half-life” and “circulating half-life” are used interchangeably herein.

[0090] The terms “antigen,” “target antigen,” or “immunogen” are used interchangeably herein to refer to the structure or binding determinant that an antibody fragment or an antibody fragment-based therapeutic binds to or has specificity against.

[0091] The term “payload” as used herein refers to a protein or peptide sequence that has biological or therapeutic activity; the counterpart to the pharmacophore of small molecules. Examples of payloads include, but are not limited to, cytokines, enzymes, hormones and blood and growth factors. Payloads can further comprise genetically fused or chemically conjugated moieties such as chemotherapeutic agents, antiviral compounds, toxins, or contrast agents. These conjugated moieties can be joined to the rest of the polypeptide via a linker which can be cleavable or non-cleavable.

[0092] As used herein, “treatment” or “treating,” “palliating,” and “ameliorating” are used interchangeably herein and refer to an approach for obtaining beneficial or desired results including but not limited to a therapeutic benefit and/or a prophylactic benefit. By “therapeutic benefit” is meant eradication or amelioration of the underlying disorder being treated. Also, a therapeutic benefit is achieved with the eradication or amelioration of one or more of the physiological symptoms associated with the underlying disease condition wherein an improvement is observed in the human or animal, notwithstanding that the human or animal can still be afflicted with the underlying disorder. For prophylactic benefit, the compositions can be administered to a human or animal at risk of developing a particular disease condition, or to a human or animal reporting one or more of the physiological symptoms of a disease, even though a diagnosis of this disease cannot have been made.

[0093] A “therapeutic effect,” as used herein, refers to a physiologic effect, including but not limited to the cure, mitigation, amelioration, or prevention of disease condition in humans or other animals, or to otherwise enhance physical or mental wellbeing of humans or animals, caused by a fusion polypeptide of the invention other than the ability to induce the production of an antibody against an antigenic epitope possessed by the biologically active protein. Determination of a therapeutically effective amount is well within the capability of those skilled in the art, especially in light of the detailed disclosure provided herein.

[0094] The terms “therapeutically effective amount” and “therapeutically effective dose,” as used herein, refers to an amount of a biologically active protein, either alone or as a part of a fusion protein composition, that is capable of having any detectable, beneficial effect on any symptom, aspect, measured parameter or characteristics of a disease state or condition when administered in one or repeated doses to a human or animal. Such effect need not be absolute to be beneficial. The disease condition can refer to a disorder or a disease.

[0095] The term “therapeutically effective dose regimen,” as used herein, refers to a schedule for consecutively administered doses of a biologically active protein, either alone or as a part of a fusion protein composition, wherein the doses are given in therapeutically effective amounts to result in sustained beneficial effect on any symptom, aspect, measured parameter or characteristics of a disease state or condition.

### Fusion Polypeptide

[0096] Disclosed herein are polypeptides comprising one or more extended recombinant polypeptides (XTEN or XTENs) (as described more fully hereinbelow) that can be fused or otherwise conjugated to another polypeptide, particularly a biologically active polypeptide, wherein said embodiments are termed BPXTEN herein.

[0097] In some embodiments, the polypeptide comprises a first XTEN polypeptide (such as those described below in the “EXTENDED RECOMBINANT POLYPEPTIDE (XTEN)” section or described anywhere else herein). In some embodiments, the polypeptide further comprises a second XTEN polypeptide (such as those described below in the “EXTENDED RECOMBINANT POLYPEPTIDE (XTEN)” section or described anywhere else herein). In some embodiments, the polypeptide comprises an XTEN polypeptide at or near its N-terminus (an “N-terminal XTEN”). In some embodiments, the polypeptide comprises an XTEN polypeptide at or near its C-terminus (a “C-terminal XTEN”). In some embodiments, the polypeptide comprises both an N-terminal XTEN polypeptide and a C-terminal XTEN polypeptide. In some embodiments, the first XTEN polypeptide is an N-terminal XTEN polypeptide and the second XTEN polypeptide is a C-terminal XTEN polypeptide.

[0098] The polypeptide can further comprise a biologically active polypeptide (“BP”) linked to the XTEN polypeptide, thereby forming a XTEN-containing fusion polypeptide termed an “BPXTEN” polypeptide herein.

[0099] The XTEN polypeptide can comprise one or more barcode fragments (as described more fully below) releasable (configured to be released) from the XTEN polypeptide upon digestion of the fusion polypeptide (or BPXTEN) by a protease. In some embodiments, each barcode fragment differs in sequence and molecular weight from all other peptide fragments (including all other barcode fragments if present) that are releasable from the polypeptide upon complete digestion of the polypeptide by the protease.

[0100] The (fusion) polypeptide can comprise one or more reference fragments (as described more fully below) releasable (configured to be released) from the polypeptide, for example, upon the protease digestion which releases the barcode fragment(s) from the polypeptide. In some embodiments, each reference fragment can be a single reference fragment that differs in sequence and molecular weight from all other peptide fragments that are releasable from the polypeptide upon digestion of the polypeptide by the protease.

### Extended Recombinant Polypeptide (XTEN)

### Chain Length and Amino Acid Composition

[0101] In some embodiments, the XTEN polypeptide comprises at least 150 amino acids. In some embodiments, the XTEN polypeptide is from 150 to 3,000 amino acids in length, or from 150 to 1,000 amino acids in length, or at least 200, at least 250, at least 300, at least 350, at least 400, at least 450, or at least 500 amino acids in length. In some embodiments, at least 90% of the amino acid residues of the XTEN polypeptide are glycine (G), alanine (A), serine (S), threonine (T), glutamate (E) or proline (P). In some embodiments, at least 91%, 92%, 93%, 94%, 95%, 96%, 97%, 98%, 99% or 100% of the amino acid residues of the XTEN polypeptide are selected from G, A, S, T, E, or P. In some embodiments, the XTEN polypeptide comprises at least 4 different types G, A, S, T, E, or P amino acids. In some embodiments, the XTEN polypeptide is characterized in that it comprises at least 150 amino acids; at least 90% of the amino acid residues of the XTEN polypeptide are G, A, S, T, E, or P and it comprises at least 4 different types of amino acids selected from G, A, S, T, E, and P that is substantially randomized with respect to any other nonoverlapping sequence motif comprising the XTEN polypeptide. In some embodiments, an XTEN-containing fusion polypeptide (e.g., a fusion polypeptide comprising a biologically active polypeptide conjugated therewith) comprises a first XTEN polypeptide and a second XTEN polypeptide. In some embodiments, the sum of the total number of amino acids in the first XTEN and the total number of amino acids in the second XTEN polypeptide is at least 300, at least 350, at least 400, at least 500, at least 600, at least 700, or at least 800 amino acids.

### Non-Overlapping Sequence Motif

[0102] In some embodiments, the XTEN polypeptides provided herein comprise, or are formed from, a plurality of non-overlapping sequence motifs. In some embodiments, at least one of the non-overlapping sequence motifs is recurring (or repeated at least two times in the XTEN), and wherein at least another one of the non-overlapping sequence motifs is non-recurring (or found only once within the XTEN). In some embodiments, the plurality of non-overlapping sequence motifs comprises a set of (recurring) non-overlapping sequence motifs, wherein each of said sequence motifs is repeated at least two times in the XTEN; and a non-overlapping (non-recurring) sequence motif that occurs (or is found) only once within the XTEN. In some embodiments, each non-overlapping sequence motif is from 9 to 14 (or 10 to 14, or 11 to 13) amino acids in length. In some embodiments, each non-overlapping sequence motif is 12 amino acids in length. In some embodiments, the plurality of non-overlapping sequence motifs comprises a set of non-overlapping (recurring) sequence motifs, wherein each of said sequence motifs is repeated at least two times in the XTEN; and is between 9 and 14 amino acids in length. In some embodiments, the set of (recurring) non-overlapping sequence motifs comprises 12-mer sequence motifs identified herein by SEQ ID NOs: 182-203 and 1715-1722 in Table 1. In some embodiments, the set of (recurring) non-overlapping sequence motifs comprises 12-mer sequence motifs identified herein by SEQ ID NOs: 186-189 in Table 1. In some embodiments, the set of (recurring) non-overlapping sequence motifs comprise at least two, at least three, or all four of 12-mer sequence motifs of SEQ ID NOs: 186-189 in Table 1.

TABLE 1
Exemplary 12-Mer Sequence Motifs for
Construction of XTENs

| Motif Family* | SEQ ID NO | Amino Acid Sequence |
|---|---|---|
| AD | 182 | GESPGGSSGSES |
| AD | 183 | GSEGSSGPGESS |
| AD | 184 | GSSESGSSEGGP |
| AD | 185 | GSGGEPSESGSS |
| AE, AM | 186 | GSPAGSPTSTEE |
| AE, AM, AQ | 187 | GSEPATSGSETP |
| AE, AM, AQ | 188 | GTSESATPESGP |
| AE, AM, AQ | 189 | GTSTEPSEGSAP |
| AF, AM | 190 | GSTSESPSGTAP |
| AF, AM | 191 | GTSTPESGSASP |
| AF, AM | 192 | GTSPSGESSTAP |
| AF, AM | 193 | GSTSSTAESPGP |
| AG, AM | 194 | GTPGSGTASSSP |
| AG, AM | 195 | GSSTPSGATGSP |
| AG, AM | 196 | GSSPSASTGTGP |
| AG, AM | 197 | GASPGTSSTGSP |
| AQ | 198 | GEPAGSPTSTSE |
| AQ | 199 | GTGEPSSTPASE |
| AQ | 200 | GSGPSTESAPTE |
| AQ | 201 | GSETPSGPSETA |
| AQ | 202 | GPSETSTSEPGA |
| AQ | 203 | GSPSEPTEGTSA |
| BC | 1715 | GSGASEPTSTEP |
| BC | 1716 | GSEPATSGTEPS |
| BC | 1717 | GTSEPSTSEPGA |
| BC | 1718 | GTSTEPSEPGSA |
| BD | 1719 | GSTAGSETSTEA |
| BD | 1720 | GSETATSGSETA |
| BD | 1721 | GTSESATSESGA |
| BD | 1722 | GTSTEASEGSAS |

*Denotes individual motif sequences that, when used together in various permutations, results in a “family sequence”

### Barcode Fragment

[0103] In some embodiments, the polypeptides provided herein comprise a barcode fragment (e.g., a first, second, or third barcode fragment of an XTEN polypeptide) releasable from the polypeptide upon digestion by a protease. In some embodiments, the barcode fragment is a portion of the XTEN that includes at least part of the (non-recurring, non-overlapping) sequence motif that occurs (or is found) only once within the XTEN; and differs in sequence and molecular weight from all other peptide fragments that are releasable from the polypeptide upon complete digestion of the polypeptide by the protease. One of ordinary skill in the art will understand that the term “barcode fragment” (or “barcode,” or “barcode sequence”) can refer to either the portion of the XTEN identified herein by cleavably fused within the polypeptide, or the resulting peptide fragment released from the polypeptide.

[0104] In some embodiments, the barcode fragment does not include the N-terminal amino acid or the C-terminal amino acid of the XTEN polypeptide. As described more fully below or described anywhere herein, in some embodiments, the barcode fragment is releasable (configured to be released) upon Glu-C digestion of the fusion polypeptide. In some embodiments, the barcode fragment does not include a glutamic acid that is immediately adjacent to another glutamic acid in the XTEN polypeptide. In some embodiments, the barcode fragment has a glutamic acid at its C-terminus. One of ordinary skill in the art will understand that the C-terminus of a barcode fragment can refer to the “last” (or the most C-terminal) amino acid residue within the barcode fragment, when cleavably fused within an XTEN polypeptide, even if other “non-barcode” amino acid residues are located C-terminal to the barcode fragment within the same XTEN polypeptide. In some embodiments, the barcode fragment has an N-terminal amino acid that is immediately preceded by a glutamic acid residue. In some embodiments, the glutamic acid residue that precedes the N-terminal amino acid is not immediately adjacent to another glutamic acid residue. In some embodiments, the barcode fragment does not include a glutamic acid residue at a position other than the C-terminus of the barcode fragment unless the glutamic acid is immediately followed by a proline. In some embodiments, the barcode fragment is located from 10 to 150, or 10 to 125 amino acids from either the N-terminus of the polypeptide or the C-terminus of the polypeptide. In some embodiments, the barcode fragment is located within, or at a location of, 300, 280, 260, 250, 240, 220, 200, 190, 180, 170, 160, 150, 140, 130, 120, 110, 100, 90, 80, 70, 60, 50, 48, 40, 36, 30, 24, 20, 12, or 10 amino acids from the N-terminus of the polypeptide, or at a location in a range between any of the foregoing. In some embodiments, the barcode fragment is located within 200, within 150, within 100, or within 50 amino acids of the N-terminus of the polypeptide. In some embodiments, the barcode fragment is located between 10 and 200, between 30 and 200, between 40 and 150, or between 50 and 100 amino acids from the N-terminus of the polypeptide. In some embodiments, the barcode fragment is located within 300, 280, 260, 250, 240, 220, 200, 190, 180, 170, 160, 150, 140, 130, 120, 110, 100, 90, 80, 70, 60, 50, 48, 40, 36, 30, 24, 20, 12, or 10 amino acids from the C-terminus of the polypeptide, or in a range between any of the foregoing. In some embodiments, the barcode fragment is located within 200, within 150, within 100, or within 50 amino acids of the C-terminus of the polypeptide. In some embodiments, the barcode fragment is located between 10 and 200, between 30 and 200, between 40 and 150, or between 50 and 100 amino acids from the C-terminus of the polypeptide. In some embodiments, the barcode fragment does not include the N-terminal amino acid or the C-terminal amino acid of the polypeptide; does not include a glutamic acid that is immediately adjacent to another glutamic acid in the XTEN; has a glutamic acid at its C-terminus; has an N-terminal amino acid that is immediately preceded by a glutamic acid residue; and (v) is located from 10 to 150, or 10 to 125 amino acids from either the N-terminus of the polypeptide or the C-terminus of the polypeptide. In some embodiments, the glutamic acid residue that precedes the N-terminal amino acid is not immediately adjacent to another glutamic acid residue. In some embodiments, the barcode fragment does not include a glutamic acid residue at a position other than the C-terminus of the barcode fragment unless the glutamic acid is immediately followed by a proline. In some embodiments, for a barcoded XTEN polypeptide fused to a biologically-active polypeptide, at least one barcode fragment (or at least two barcode fragments, or three barcode fragments) contained in the barcoded XTEN is located at least 50, 75, 100, 125, 150, 175, 200, 225, 250, 275, 300 amino acids from the biologically active polypeptide. In some embodiments, the barcode fragment is at least 4, at least 5, at least 6, at least 7, or at least 8 amino acids in length. In some embodiments, the barcode fragment is at least 4 amino acids in length. In some embodiments, the barcode fragment is 4, 5, 6, 7, 8, 9, 10, 11, 12, 13, 14, 15, 16, 17, 18, 19, 20, 21, 22, 23, 24, 25 amino acids in length, or in a range between any of the foregoing values. In some embodiments, the barcode fragment is between 4 and 20, between 5 and 15, between 6 and 12, or between 7 and 10 amino acids in length. In some embodiments, the barcode fragment is selected from SEQ ID NOs: 8020-8030 (BAR001-BAR011) in Table 2.

TABLE 2
Exemplary Barcode Fragments Releasable Upon Glu-C
Digest

| Amino Acid Sequence | | SEQ ID NO: |
|---|---|---|
| SPATSGSTPE | BAR001 | 8020 |
| GSAPATSE | BAR002 | 8021 |
| GSAPGTATE | BAR003 | 8022 |
| GSAPGTE | BAR004 | 8023 |
| PATSGPTE | BAR005 | 8024 |
| SASPE | BAR006 | 8025 |
| PATSGSTE | BAR007 | 8026 |
| GSAPGTSAE | BAR008 | 8027 |
| SATSGSE | BAR009 | 8028 |
| SGPGSTPAE | BAR010 | 8029 |
| SGSE | BAR011 | 8030 |

[0105] In some embodiments, a barcoded XTEN polypeptide comprises only one barcode fragment. In some embodiments, a barcoded XTEN polypeptide comprises a set of barcode fragments, comprising a first barcode fragment, such as those described above or anywhere else herein. In these embodiments, each member of the set of barcode sequences can be distinguished from all other barcode sequences on the basis of amino acid sequence or molecular weight (wherein these methods for distinguishing different barcode sequences will be related). In some embodiments, the set of barcode fragments comprises a second barcode fragment (or a further barcode fragment), such as those described above or anywhere else herein. In some embodiments, the set of barcode fragments comprises a third barcode fragment, such as those described above or anywhere else herein. The set of barcode fragments fused within an N-terminal XTEN polypeptide can be referred to as an N-terminal set of barcodes (“an N-terminal set”). The set of barcode fragments fused within a C-terminal XTEN polypeptide can be referred to as a C-terminal set of barcodes (“a C-terminal set”). In some embodiments, the N-terminal set comprises a first barcode fragment and a second barcode fragment. In some embodiments, the N-terminal set further comprises a third barcode fragment. In some embodiments, the C-terminal set comprises a first barcode fragment and a second barcode fragment. In some embodiments, the C-terminal set further comprises a third barcode fragment. In some embodiments, the second barcode fragment is located N-terminal to the first barcode fragment of the same set. In some embodiments, the second barcode fragment is located C-terminal to the first barcode fragment of the same set. In some embodiments, the third barcode fragment is located N-terminal to both the first and second barcode fragments. In some embodiments, the third barcode fragment is located C-terminal to both the first and second barcode fragments. In some embodiments, the third barcode fragment is located between the first and second barcode fragments. In some embodiments, the polypeptide comprises a set of barcode fragments that includes a first barcode fragment, a further (second) barcode fragment, and at least one additional barcode fragment, wherein each barcode fragment of the set of barcode fragments is a portion of the second XTEN polypeptide and differs in sequence and molecular weight from all other peptides fragments that are releasable from the polypeptide upon complete digestion of the polypeptide by the protease.

### Exemplary Barcoded XTEN

[0106] Amino acid sequences of 13 exemplary barcoded XTENs, containing one barcode (e.g., SEQ ID NOs: 8002-8003, 8005-8009, and 8013), or two barcodes (e.g., SEQ ID NOs: 8001, 8004, 8010, and 8012), or three barcodes (e.g., SEQ ID NO: 8011), are illustrated in Table 3a. Among these 13 exemplary barcoded XTEN polypeptides, six (SEQ ID NOs: 8001-8003, 8008-8009, and 8011) can be fused to a biologically-active protein at the C-terminal of the biologically-active protein, and seven (SEQ ID NOs: 8004-8007, 8010, and 8012-8013) can be fused at the N-terminal of the biologically-active protein. In some embodiments, the XTEN polypeptide has at least 90%, at least 92%, at least 95%, at least 98%, at least 99% or 100% sequence identity to a sequence selected from SEQ ID NOs: 8001-8019 in Table 3a.

TABLE 3a
Exemplary Barcoded XTENs

| SEQ ID | XTEN | # of | | Total # |
|---|---|---|---|---|
| NO. | Type | Barcode(s) | Amino Acid Sequence | of AAs |
| 8001 | C-terminal | 2 | PGSPAGSPTSTEEGTSESATPESGPGTSTEPSEGSAPGSPAGS | 864 |
| | XTEN | | PTSTEEGTSTEPSEGSAPGTSTEPSEGSAPGTSESATPESGPG | |
| | | | SEPATSGSETPGSEPATSGSETPGSPAGSPTSTEEGTSESATP | |
| | | | ESGPGTSTEPSEGSAPGTSTEPSEGSAPGSPAGSPTSTEEGTS | |
| | | | TEPSEGSAPGTSTEPSEGSAPGTSESATPESGPGTSTEPSEGS | |
| | | | APGTSESATPESGPGSEPATSGSETPGTSTEPSEGSAPGTSTE | |
| | | | PSEGSAPGTSESATPESGPGTSESATPESGPGSPAGSPTSTEE | |
| | | | GTSESATPESGPGSEPATSGSETPGTSESATPESGPGTSTEPS | |
| | | | EGSAPGTSTEPSEGSAPGTSTEPSEGSAPGTSTEPSEGSAPGT | |
| | | | STEPSEGSAPGTSTEPSEGSAPGSPAGSPTSTEEGTSTEPSEG | |
| | | | SAPGTSESATPESGPGSEPATSGSETPGTSESATPESGPGSEP | |
| | | | ATSGSETPGTSESATPESGPGTSTEPSEGSAPGTSESATPESG | |
| | | | PGSPAGSPTSTEEGSPAGSPTSTEEGSPAGSPTSTEEGTSESA | |
| | | | TPESGPGTSTEPSEGSAPGTSESATPESGPGSEPATSGSETPG | |
| | | | TSESATPESGPGSEPATSGSETPGTSESATPESGPGTSTEPSE | |
| | | | GSAPGSPAGSPTSTEEGTSESATPESGPGSEPATSGSETPGTS | |
| | | | ESATPESGPGSPAGSPTSTEEGSPAGSPTSTEEGTSTEPSEGS | |
| | | | APGTSESATPESGPGTSESATPESGPGftabTSESATPESGPGS | |
| | | | EPATSGPTESGSEPATSGSETPGSPAGSPTSTEEGTSTEPSE | |
| | | | GSAPGTESTPSEGSAPGSEPATSGSETPGTSESATPESGPGT | |
| | | | STEPSEGSAPGEPEA | |
| 8002 | C-terminal | 1 | PGSPAGSPTSTEEGTSESATPESGPGTSTEPSEGSAPGSPAGS | 864 |
| | XTEN | | PTSTEEGTSTEPSEGSAPGTSTEPSEGSAPGTSESATPESGPG | |
| | | | SEPATSGSETPGSEPATSGSETPGSPAGSPTSTEEGTSESATP | |
| | | | ESGPGTSTEPSEGSAPGTSTEPSEGSAPGSPAGSPTSTEEGTS | |
| | | | TEPSEGSAPGTSTEPSEGSAPGTSESATPESGPGTSTEPSEGS | |
| | | | APGTSESATPESGPGSEPATSGSETPGTSTEPSEGSAPGTSTE | |
| | | | PSEGSAPGTSESATPESGPGTSESATPESGPGSPAGSPTSTEE | |
| | | | GTSESATPESGPGSEPATSGSETPGTSESATPESGPGTSTEPS | |
| | | | EGSAPGTSTEPSEGSAPGTSTEPSEGSAPGTSTEPSEGSAPGT | |
| | | | STEPSEGSAPGTSTEPSEGSAPGSPAGSPTSTEEGTSTEPSEG | |
| | | | SAPGTSESATPESGPGSEPATSGSETPGTSESATPESGPGSEP | |
| | | | ATSGSETPGTSESATPESGPGTSTEPSEGSAPGTSESATPESG | |
| | | | PGSPAGSPTSTEEGSPAGSPTSTEEGSPAGSPTSTEEGTSESA | |
| | | | TPESGPGTSTEPSEGSAPGTSESATPESGPGSEPATSGSETPG | |
| | | | TSESATPESGPGSEPATSGSETPGTSESATPESGPGTSTEPSE | |
| | | | GSAPGSPAGSPTSTEEGTSESATPESGPGSEPATSGSETPGTS | |
| | | | ESATPESGPGSPAGSPTSTEEGSPAGSPTSTEEGTSTEPSEGS | |
| | | | APGTSESATPESGPGTSESATPESGPGTSESATPESGPGSEPA | |
| | | | TSGPTESGSEPATSGSETPGSPAGSPTSTEEGTSTEPSEGSAP | |
| | | | GTSTEPSEGSAPGSEPATSGSETPGTSESATPESGPGTSTEPS | |
| | | | EGSAPGEPEA | |
| 8003 | C-terminal | 1 | PGSPAGSPTSTEEGTSESATPESGPGTSTEPSEGSAPGSPAGS | 864 |
| | XTEN | | PTSTEEGTSTEPSEGSAPGTSTEPSEGSAPGTSESATPESGPG | |
| | | | SEPATSGSETPGSEPATSGSETPGSPAGSPTSTEEGTSESATP | |
| | | | ESGPGTSTEPSEGSAPGTSTEPSEGSAPGSPAGSPTSTEEGTS | |
| | | | TEPSEGSAPGTSTEPSEGSAPGTSESATPESGPGTSTEPSEGS | |
| | | | APGTSESATPESGPGSEPATSGSETPGTSTEPSEGSAPGTSTE | |
| | | | PSEGSAPGTSESATPESGPGTSESATPESGPGSPAGSPTSTEE | |
| | | | GTSESATPESGPGSEPATSGSETPGTSESATPESGPGTSTEPS | |
| | | | EGSAPGTSTEPSEGSAPGTSTEPSEGSAPGTSTEPSEGSAPGT | |
| | | | STEPSEGSAPGTSTEPSEGSAPGSPAGSPTSTEEGTSTEPSEG | |
| | | | SAPGTSESATPESGPGSEPATSGSETPGTSESATPESGPGSEP | |
| | | | ATSGSETPGTSESATPESGPGTSTEPSEGSAPGTSESATPESG | |
| | | | PGSPAGSPTSTEEGSPAGSPTSTEEGSPAGSPTSTEEGTSESA | |
| | | | TPESGPGTSTEPSEGSAPGTSESATPESGPGSEPATSGSETPG | |
| | | | TSESATPESGPGSEPATSGSETPGTSESATPESGPGTSTEPSE | |
| | | | GSAPGSPAGSPTSTEEGTSESATPESGPGSEPATSGSETPGTS | |
| | | | ESATPESGPGSPAGSPTSTEEGSPAGSPTSTEEGTSTEPSEGS | |
| | | | APGTSESATPESGPGTSESATPESGPGTSESATPESGPGSEPA | |
| | | | TSGSETPGSEPATSGSETPGSPAGSPTSTEEGTSTEPSEGSAP | |
| | | | GTESTPSEGSAPGSEPATSGSETPGTSESATPESGPGTSTEPS | |
| | | | EGSAPGEPEA | |
| 8004 | N-terminal | 2 | ASSPAGSPTSTESGTSESATPESGPGTETEPSEGSAPGTSESA | 288 |
| | XTEN | | TPESGPGSEPATSGSETPGTSESATPESGPGSTPAESGSETP | |
| | | | GTSESATPESGPGTSTEPSEGSAPGSPAGSPTSTEEGTSESAT | |
| | | | PESGPGESPATSGSTPEGTSESATPESGPGSPAGSPTSTEEGS | |
| | | | PAGSPTSTEEGTSTEPSEGSAPGTSESATPESGPGTSESATPE | |
| | | | SGPGTSESATPESGPGSEPATSGSETPGSEPATSGSETPGSPA | |
| | | | GSPTSTEEGTSTEPSEGSAPGTSTEPSEGSAPGGSAP | |
| 8005 | N-terminal | 1 | ASSPAGSPTSTESGTSESATPESGPGTSTEPSEGSAPGTSESA | 288 |
| | XTEN | | TPESGPGSEPATSGSETPGTSESATPESGPGSEPATSGSETPG | |
| | | | TSESATPESGPGTSTEPSEGSAPGSPAGSPTSTEEGTSESATP | |
| | | | ESGPGESPATSGSTPEGTSESATPESGPGSPAGSPTSTEEGSP | |
| | | | AGSPTSTEEGTSTEPSEGSAPGTSESATPESGPGTSESATPES | |
| | | | GPGTSESATPESGPGSEPATSGSETPGSEPATSGSETPGSPAG | |
| | | | SPTSTEEGTSTEPSEGSAPGTSTEPSEGSAPGGSAP | |
| 8006 | N-terminal | 1 | ASSPAGSPTSTESGTSESATPESGPGTSTEPSEGSAPGTSESA | 288 |
| | XTEN | | TPESGPGSEPATSGSETPGTSESATPESGPGSTPAESGSETP | |
| | | | GTSESATPESGPGTSTEPSEGSAPGSPAGSPTSTEEGTSESAT | |
| | | | PESGPGEEPATSGSTPEGTSESATPESGPGSPAGSPTSTEEGS | |
| | | | PAGSPTSTEEGTSTEPSEGSAPGTSESATPESGPGTSESATPE | |
| | | | SGPGTSESATPESGPGSEPATSGSETPGSEPATSGSETPGSPA | |
| | | | GSPTSTEEGTSTEPSEGSAPGTSTEPSEGSAPGGSAP | |
| 8007 | N-terminal | 1 | ASSPAGSPTSTESGTSESATPESGPGTSTEPSEGSAPGTSESA | 288 |
| | XTEN | | TPESGPGSEPATSGSETPGTSESATPESGPGSTPAESGSETP | |
| | | | GTSESATPESGPGTSTEPSEGSAPGSPAGSPTSTEEGTSESAT | |
| | | | PESGPGSEPATSGSETPGTSESATPESGPGSPAGSPTSTEEGS | |
| | | | PAGSPTSTEEGTSTEPSEGSAPGTSESATPESGPGTSESATPE | |
| | | | SGPGTSESATPESGPGSEPATSGSETPGSEPATSGSETPGSPA | |
| | | | GSPTSTEEGTSTEPSEGSAPGTSTEPSEGSAPGGSAP | |
| 8008 | C-terminal | 1 | PGSPAGSPTSTEEGTSESATPESGPGTSTEPSEGSAPGSPAGS | 864 |
| | XTEN | | PTSTEEGTSTEPSEGSAPGTSTEPSEGSAPGTSESATPESGPG | |
| | | | SEPATSGSETPGSEPATSGSETPGSPAGSPTSTEEGTSESATP | |
| | | | ESGPGTSTEPSEGSAPGTSTEPSEGSAPGSPAGSPTSTEEGTS | |
| | | | TEPSEGSAPGTSTEPSEGSAPGTSESATPESGPGTSTEPSEGS | |
| | | | APGTSESATPESGPGSEPATSGSETPGTSTEPSEGSAPGTSTE | |
| | | | PSEGSAPGTSESATPESGPGTSESATPESGPGSPAGSPTSTEE | |
| | | | GTSESATPESGPGSEPATSGSETPGTSESATPESGPGTSTEPS | |
| | | | EGSAPGTSTEPSEGSAPGTSTEPSEGSAPGTSTEPSEGSAPGT | |
| | | | STEPSEGSAPGTSTEPSEGSAPGSPAGSPTSTEEGTSTEPSEG | |
| | | | SAPGTSESATPESGPGSEPATSGSETPGTSESATPESGPGSEP | |
| | | | ATSGSETPGTSESATPESGPGTSTEPSEGSAPGTSESATPESG | |
| | | | PGSPAGSPTSTEEGSPAGSPTSTEEGSPAGSPTSTEEGTSESA | |
| | | | TPESGPGTSTEPSEGSAPGTSESATPESGPGSEPATSGSETPG | |
| | | | TSESATPESGPGSEPATSGSETPGTSESATPESGPGTSTEPSE | |
| | | | GSAPGSPAGSPTSTEEGTSESATPESGPGSEPATSGSETPGTS | |
| | | | ESATPESGPGSPAGSPTSTEEGSPAGSPTSTEEGTSTEPSEGS | |
| | | | APGTSESATPESGPGTSESATPESGPGTSESATPESGPGSEPA | |
| | | | TSGSETPGSEPATSGSETPGSPAGSPTSTEEGTSTEPSEGSAP | |
| | | | GTESTPSEGSAPGSEPATSGSETPGTSESATPESGPGTSTEPS | |
| | | | EGSAPG | |
| 8009 | C-terminal | 1 | PGSPAGSPTSTEEGTSESATPESGPGSEPATSGSETPGTSESA | 576 |
| | XTEN | | TPESGPGTSTEPSEGSAPGTSTEPSEGSAPGTSTEPSEGSAPG | |
| | | | TSTEPSEGSAPGTSTEPSEGSAPGTSTEPSEGSAPGSPAGSPT | |
| | | | STEEGTSTEPSEGSAPGTSESATPESGPGSEPATSGSETPGTS | |
| | | | ESATPESGPGSEPATSGSETPGTSESATPESGPGTSTEPSEGS | |
| | | | APGTSESATPESGPGSPAGSPTSTEEGSPAGSPTSTEEGSPAG | |
| | | | SPTSTEEGTSESATPESGPGTSTEPSEGSAPGTSESATPESGP | |
| | | | GSEPATSGSETPGTSESATPESGPGSEPATSGSETPGTSESAT | |
| | | | PESGPGTSTEPSEGSAPGSPAGSPTSTEEGTSESATPESGPGS | |
| | | | EPATSGSETPGTSESATPESGPGSPAGSPTSTEEGSPAGSPTS | |
| | | | TEEGTSTEPSEGSAPGTSESATPESGPGTSESATPESGPGTSE | |
| | | | SATPESGPGSEPATSGSETPGSEPATSGSETPGSPAGSPTSTE | |
| | | | EGTSTEPSEGSAPGTESTPSEGSAPGSEPATSGSETPGTSES | |
| | | | ATPESGPGTSTEPSEGSAPG | |
| 8010 | N-terminal | 2 | SAGSPGSPAGSPTSTEEGTSESATPESGPGTSTEPSEGSAPGS | 1152 |
| | XTEN | | PAGSPTSTEEGTSTEPSEGSAPGTSTEPSEGSAPGTSESATPE | |
| | | | SGPGSTPAESGSETPGSEPATSGSETPGSPAGSPTSTEEGTS | |
| | | | ESATPESGPGTSTEPSEGSAPGTSTEPSEGSAPGSPAGSPTST | |
| | | | EEGTSTEPSEGSAPGTSTEPSEGSAPGTSESATPESGPGTSTE | |
| | | | PSEGSAPGTSESATPESGPGSEPATSGSTETPGTSTEPSEGSA | |
| | | | PGTSTEPSEGSAPGTSESATPESGPGTSESATPESGPGSPAGS | |
| | | | PTSTEEGTSESATPESGPGSEPATSGSETPGTSESATPESGPG | |
| | | | TSTEPSEGSAPGTSTEPSEGSAPGTSTEPSEGSAPGTSTEPSE | |
| | | | GSAPGTSTEPSEGSAPGTSTEPSEGSAPGSPAGSPTSTEEGTS | |
| | | | TEPSEGSAPGTSESATPESGPGSEPATSGSETPGTSESATPES | |
| | | | GPGSEPATSGSETPGTSESATPESGPGTSTEPSEGSAPGTSES | |
| | | | ATPESGPGSPAGSPTSTEEGSPAGSPTSTEEGSPAGSPTSTEE | |
| | | | GTSESATPESGPGTSTEPSEGSAPGTSESATPESGPGSEPATS | |
| | | | GSETPGTSESATPESGPGSEPATSGSETPGTSESATPESGPGT | |
| | | | STEPSEGSAPGSPAGSPTSTEEGTSESATPESGPGSEPATSGS | |
| | | | ETPGTSESATPESGPGSPAGSPTSTEEGSPAGSPTSTEEGTST | |
| | | | EPSEGSAPGTSESATPESGPGTSESATPESGPGTSESATPESG | |
| | | | PGSEPATSGSETPGSEPATSGSETPGSPAGSPTSTEEGTSTEP | |
| | | | SEGSAPGTSTEPSEGSAPGSEPATSGSETPGTSESATPESGPG | |
| | | | TSTEPSEGSAPGSPAGSPTSTEEGTSESATPESGPGTSTEPSE | |
| | | | GSAPGSPAGSPTSTEEGTSTEPSEGSAPGTSTEPSEGSAPGTS | |
| | | | ESATPESGPGSEPATSGSETPGSEPATSGSETPGSPAGSPTST | |
| | | | EEGTSESATPESGPGTSTEPSEGSAPGTSTEPSEGSAPGSPAG | |
| | | | SPTSTEEGTSTEPSEGSAPGTSTEPSEGSAPGTSESATPESGP | |
| | | | GTSTEPSEGSAPGTSESATPESGPGSEPATSGSETPGTSTEPS | |
| | | | EGSAPGTSTEPSEGSAPGTSESATPESGPGTESAS | |
| 8011 | C-terminal | 3 | SAGSPGSPAGSPTSTEEGTSESATPESGPGTSTEPSEGSAPGS | 1152 |
| | XTEN | | PAGSPTSTEEGTSTEPSEGSAPGTSTEPSEGSAPGTSESATPE | |
| | | | SGPGSEPATSGSETPGSEPATSGSETPGSPAGSPTSTEEGTSE | |
| | | | SATPESGPGTSTEPSEGSAPGTSTEPSEGSAPGSPAGSPTSTE | |
| | | | EGTSTEPSEGSAPGTSTEPSEGSAPGTSESATPESGPGTSTEP | |
| | | | SEGSAPGTSESATPESGPGSEPATSGSETPGTSTEPSEGSAPG | |
| | | | TSTEPSEGSAPGTSESATPESGPGTSESATPESGPGSPAGSPT | |
| | | | STEEGTSESATPESGPGSEPATSGSETPGTSESATPESGPGTS | |
| | | | TEPSEGSAPGTSTEPSEGSAPGTSTEPSEGSAPGTSTEPSEGS | |
| | | | APGTSTEPSEGSAPGTSTEPSEGSAPGSPAGSPTSTEEGTSTE | |
| | | | PSEGSAPGTSESATPESGPGSEPATSGSETPGTSESATPESGP | |
| | | | GSEPATSGSETPGTSESATPESGPGTSTEPSEGSAPGTSESAT | |
| | | | PESGPGSPAGSPTSTEEGSPAGSPTSTEEGSPAGSPTSTEEGT | |
| | | | SESATPESGPGTSTEPSEGSAPGTSESATPESGPGSEPATSGS | |
| | | | ETPGTSESATPESGPGSEPATSGSETPGTSESATPESGPGTST | |
| | | | EPSEGSAPGSPAGSPTSTEEGTSESATPESGPGSEPATSGSET | |
| | | | PGTSESATPESGPGSPAGSPTSTEEGSPAGSPTSTEEGTSTEP | |
| | | | SEGSAPGTSESATPESGPGTSESATPESGPGTSESATPESGPG | |
| | | | SEPATSGSETPGSEPATSGSETPGSPAGSPTSTEEGTSTEPSE | |
| | | | GSAPGTSTEPSEGSAPGSEPATSGSETPGTSESATPESGPGTS | |
| | | | TEPSEGSAPGSPAGSPTSTEEGTSESATPESGPGTSTEPSEGS | |
| | | | APGSPAGSPTSTEEGTSTEPSEGSAPGTSTEPSEGSAPGTSES | |
| | | | ATPESGPGSEPATSGSETPGSEPATSGSTETPGSPAGSPTSTE | |
| | | | EGTSESATPESGPGTSTEPSEGSAPGTSTEPSEGSAPGSPAGS | |
| | | | PTSTEEGTSTEPSEGSAPGTATESPEGSAPGTSESATPESGP | |
| | | | GTSTEPSEGSAPGTSAESATPESGPGSEPATSGSETPGTSTE | |
| | | | PSEGSAPGTSTEPSEGSAPGTSESATPESGPGTESAS | |
| 8012 | N-terminal | 2 | GSPAGSPTSTEEGTSESATPESGPGTSTEPSEGSAPGSPAGSP | 864 |
| | XTEN | | TSTEEGTSTEPSEGSAPGTSTEPSEGSAPATSESATPESGPGS | |
| | | | EPATSGSETPGSEPATSGSETPGSPAGSPTSTEEGTSESASPE | |
| | | | SGPGTSTEPSEGSAPGTSTEPSEGSAPGSPAGSPTSTEEGTST | |
| | | | EPSEGSAPGTSTEPSEGSAPGTSESATPESGPGTSTEPSEGSA | |
| | | | PGTSESATPESGPGSEPATSGSETPGTSTEPSEGSAPGTSTEP | |
| | | | SEGSAPGTSESATPESGPGTSESATPESGPGSPAGSPTSTEEG | |
| | | | TSESATPESGPGSEPATSGSETPGTSESATPESGPGTSTEPSE | |
| | | | GSAPGTSTEPSEGSAPGTSTEPSEGSAPGTSTEPSEGSAPGTS | |
| | | | TEPSEGSAPGTSTEPSEGSAPGSPAGSPTSTEEGTSTEPSEGS | |
| | | | APGTSESATPESGPGSEPATSGSETPGTSESATPESGPGSEPA | |
| | | | TSGSETPGTSESATPESGPGTSTEPSEGSAPGTSESATPESGP | |
| | | | GSPAGSPTSTEEGSPAGSPTSTEEGSPAGSPTSTEEGTSESAT | |
| | | | PESGPGTSTEPSEGSAPGTSESATPESGPGSEPATSGSETPGT | |
| | | | SESATPESGPGSEPATSGSETPGTSESATPESGPGTSTEPSEG | |
| | | | SAPGSPAGSPTSTEEGTSESATPESGPGSEPATSGSETPGTSE | |
| | | | SATPESGPGSPAGSPTSTEEGSPAGSPTSTEEGTSTEPSEGSA | |
| | | | PGTSESATPESGPGTSESATPESGPGTSESATPESGPGSEPAT | |
| | | | SGSETPGSEPATSGSETPGSPAGSPTSTEEGTSTEPSEGSAPG | |
| | | | TSTEPSEGSAPGSEPATSGSETPGTSESATPESGPGTSTEPSE | |
| | | | GSAP | |
| 8013 | N-terminal | 1 | GSPAGSPTSTEEGTSESATPESGPGTSTEPSEGSAPGSPAGSP | 864 |
| | XTEN | | TSTEEGTSTEPSEGSAPGTSTEPSEGSAPGTSESATPESGPGS | |
| | | | ESATSGSETPGSEPATSGSETPGSPAGSPTSTEEGTSESATPE | |
| | | | SGPGTSTEPSEGSAPGTSTEPSEGSAPGSPAGSPTSTEEGTST | |
| | | | EPSEGSAPGTSTEPSEGSAPGTSESATPESGPGTSTEPSEGSA | |
| | | | PGTSESATPESGPGSEPATSGSETPGTSTEPSEGSAPGTSTEP | |
| | | | SEGSAPGTSESATPESGPGTSESATPESGPGSPAGSPTSTEEG | |
| | | | TSESATPESGPGSEPATSGSETPGTSESATPESGPGTSTEPSE | |
| | | | GSAPGTSTEPSEGSAPGTSTEPSEGSAPGTSTEPSEGSAPGTS | |
| | | | TEPSEGSAPGTSTEPSEGSAPGSPAGSPTSTEEGTSTEPSEGS | |
| | | | APGTSESATPESGPGSEPATSGSETPGTSESATPESGPGSEPA | |
| | | | TSGSETPGTSESATPESGPGTSTEPSEGSAPGTSESATPESGP | |
| | | | GSPAGSPTSTEEGSPAGSPTSTEEGSPAGSPTSTEEGTSESAT | |
| | | | PESGPGTSTEPSEGSAPGTSESATPESGPGSEPATSGSETPGT | |
| | | | SESATPESGPGSEPATSGSETPGTSESATPESGPGTSTEPSEG | |
| | | | SAPGSPAGSPTSTEEGTSESATPESGPGSEPATSGSETPGTSE | |
| | | | SATPESGPGSPAGSPTSTEEGSPAGSPTSTEEGTSTEPSEGSA | |
| | | | PGTSESATPESGPGTSESATPESGPGTSESATPESGPGSEPAT | |
| | | | SGSETPGSEPATSGSETPGSPAGSPTSTEEGTSTEPSEGSAPG | |
| | | | TSTEPSEGSAPGSEPATSGSETPGTSESATPESGPGTSTEPSE | |
| | | | GSAP | |
| 8014 | N-terminal | 1 | SPAGSPTSTESGTSESATPESGPGTSTEPSEGSAPGTSESATP | 292 |
| | XTEN | | ESGPGSEPATSGSETPGTSESATPESGPGSTPAESGSETPGT | |
| | (with His- | | SESATPESGPGTSTEPSEGSAPGSPAGSPTSTEEGTSESATPE | |
| | tag) | | SGPGSEPATSGSETPGTSESATPESGPGSPAGSPTSTEEGSPA | |
| | | | GSPTSTEEGTSTEPSEGSAPGTSESATPESGPGTSESATPESG | |
| | | | PGTSESATPESGPGSEPATSGSETPGSEPATSGSETPGSPAGS | |
| | | | PTSTEEGTSTEPSEGSAPGTSTEPSEGSAPGGSAP | |
| 8015 | C-terminal | 1 | PGSPAGSPTSTEEGTSESATPESGPGSEPATSGSETPGTSESA | 582 |
| | XTEN | | TPESGPGTSTEPSEGSAPGTSTEPSEGSAPGTSTEPSEGSAPG | |
| | | | TSTEPSEGSAPGTSTEPSEGSAPGTSTEPSEGSAPGSPAGSPT | |
| | | | STEEGTSTEPSEGSAPGTSESATPESGPGSEPATSGSETPGTS | |
| | | | ESATPESGPGSEPATSGSETPGTSESATPESGPGTSTEPSEGS | |
| | | | APGTSESATPESGPGSPAGSPTSTEEGSPAGSPTSTEEGSPAG | |
| | | | SPTSTEEGTSESATPESGPGTSTEPSEGSAPGTSESATPESGP | |
| | | | GSEPATSGSETPGTSESATPESGPGSEPATSGSETPGTSESAT | |
| | | | PESGPGTSTEPSEGSAPGSPAGSPTSTEEGTSESATPESGPGS | |
| | | | EPATSGSETPGTSESATPESGPGSPAGSPTSTEEGSPAGSPTS | |
| | | | TEEGTSTEPSEGSAPGTSESATPESGPGTSESATPESGPGTSE | |
| | | | SATPESGPGSEPATSGSETPGSEPATSGSETPGSPAGSPTSTE | |
| | | | EGTSTEPSEGSAPGTESTPSEGSAPGSEPATSGSETPGTSES | |
| | | | ATPESGPGTSTEPSEGSAPGEPEA | |
| 8016 | C-terminal | 1 | TPESGPGTSESATPESGPGSPAGSPTSTEEGTSESATPESGPG | 576 |
| | XTEN | | SEPATSGSETPGTSESATPESGPGTSTEPSEGSAPGTSTEPSE | |
| | | | GSAPGTSTEPSEGSAPGTSTEPSEGSAPGTSTEPSEGSAPGTS | |
| | | | TEPSEGSAPGSPAGSPTSTEEGTSTEPSEGSAPGTSESATPES | |
| | | | GPGSEPATSGSETPGTSESATPESGPGSEPATSGSETPGTSES | |
| | | | ATPESGPGTSTEPSEGSAPGTSESATPESGPGSPAGSPTSTEE | |
| | | | GSPAGSPTSTEEGSPAGSPTSTEEGTSESATPESGPGTSTEPS | |
| | | | EGSAPGTSESATPESGPGSEPATSGSETPGTSESATPESGPGS | |
| | | | EPATSGSETPGTSESATPESGPGTSTEPSEGSAPGSPAGSPTS | |
| | | | TEEGTSESATPESGPGSEPATSGSETPGTSESATPESGPGSPA | |
| | | | GSPTSTEEGSPAGSPTSTEEGTSTEPSEGSAPGTSESATPESG | |
| | | | PGTSESATPESGPGTSESATPESGPGSEPATSGSETPGSESAT | |
| | | | SGSETPGSPAGSPTSTEEGTSTEPSEGSAPGTSTEPSEGSAPG | |
| | | | SEPATSGSETPGTSESA | |
| 8017 | C-terminal | 1 | GTSTEPSEGSAPGTSESATPESGPGSEPATSGSETPGSEPATS | 576 |
| | XTEN | | GSETPGSPAGSPTSTEEGTSESATPESGPGTSTEPSEGSAPGT | |
| | | | STEPSEGSAPGSPAGSPTSTEEGTSTEPSEGSAPGTSTEPSEG | |
| | | | SAPGTSESATPESGPGTSTEPSEGSAPGTSESATPESGPGSEP | |
| | | | ATSGSETPGTSTEPSEGSAPGTSTEPSEGSAPGTSESATPESG | |
| | | | PGTSESATPESGPGSPAGSPTSTEEGTSESATPESGPGSEPAT | |
| | | | SGSETPGTSESATPESGPGTSTEPSEGSAPGTSTEPSEGSAPG | |
| | | | TSTEPSEGSAPGTSTEPSEGSAPGTSTEPSEGSAPGTSTEPSE | |
| | | | GSAPGSPAGSPTSTEEGTSTEPSEGSAPGTSESATPESGPGSE | |
| | | | PATSGSETPGTSESATPESGPGSEPATSGSETPGTSESATPES | |
| | | | GPGTSTEPSEGSAPGTSESASPESGPGSPAGSPTSTEEGSPAG | |
| | | | SPTSTEEGSPAGSPTSTEEGTSESATPESGPGTSTEPSEGSAP | |
| | | | GTSESATPESGPGSEPATSGSETPGTSESATPESGPGSEPATS | |
| | | | GSETPGTSESATPESGP | |
| 8018 | C-terminal | 1 | GSETPGSPAGSPTSTEEGTSESATPESGPGTSTEPSEGSAPGT | 576 |
| | XTEN | | STEPSEGSAPGSPAGSPTSTEEGTSTEPSEGSAPGTSTEPSEG | |
| | | | SAPGTSESATPESGPGTSTEPSEGSAPGTSESATPESGPGSEP | |
| | | | ATSGSETPGTSTEPSEGSAPGTSTEPSEGSAPGTSESATPESG | |
| | | | PGTSESATPESGPGSPAGSPTSTEEGTSESATPESGPGSEPAT | |
| | | | SGSETPGTSESATPESGPGTSTEPSEGSAPGTSTEPSEGSAPG | |
| | | | TSTEPSEGSAPGTSTEPSEGSAPGTSTEPSEGSAPGTSTEPSE | |
| | | | GSAPGSPAGSPTSTEEGTSTEPSEGSAPGTSESATPESGPGSE | |
| | | | PATSGSETPGTSESATPESGPGSEPATSGSETPGTSESATPES | |
| | | | GPGTSTEPSEGSAPGTSESATPESGPGSPAGSPTSTEEGSPAG | |
| | | | SPTSTEEGSPAGSPTSTEEGTSESATPESGPGTSTEPSEGSAP | |
| | | | GTSESATPESGPGSEPATSGSTETGTSESATPESGPGSEPAT | |
| | | | SGSETPGTSESATPESGPGTSTEPSEGSAPGSPAGSPTSTEEG | |
| | | | TSESATPESGPGSEPATS | |
| 8019 | C-terminal | 1 | EGSAPGTSTEPSEGSAPGTSESATPESGPGTSTEPSEGSAPGT | 576 |
| | XTEN | | SESATPESGPGSEPATSGSETPGTSTEPSEGSAPGTSTEPSEG | |
| | | | SAPGTSESATPESGPGTSESATPESGPGSPAGSPTSTEEGTSE | |
| | | | SATPESGPGSEPATSGSETPGTSESATPESGPGTSTEPSEGSA | |
| | | | PGTSTEPSEGSAPGTSTEPSEGSAPGTSTEPSEGSAPGTSTEP | |
| | | | SEGSAPGTSTEPSEGSAPGSPAGSPTSTEEGTSTEPSEGSAPG | |
| | | | TSESATPESGPGSEPATSGSETPGTSESATPESGPGSEPATSG | |
| | | | SETPGTSESATPESGPGTSTEPSEGSAPGTSESATPESGPGSP | |
| | | | AGSPTSTEEGSPAGSPTSTEEGSPAGSPTSTEEGTSESATPES | |
| | | | GPGTSTEPSEGSAPGTSESATPESGPGSEPATSGSETPGTSES | |
| | | | ATPESGPGSEPATSGSETPGTSESASPESGPGTSTEPSEGSAP | |
| | | | GSPAGSPTSTEEGTSESATPESGPGSEPATSGSETPGTSESAT | |
| | | | PESGPGSPAGSPTSTEEGSPAGSPTSTEEGTSTEPSEGSAPGT | |
| | | | SESATPESGPGTSESAT | |

[0107] In some embodiments, a barcoded XTEN polypeptide can be obtained by making one or more mutations to a general-purpose XTEN polypeptide, such as any listed in Table 3b, according to one or more of the following criteria: to minimize the sequence change in the XTEN polypeptide, to minimize the amino acid composition change in the XTEN polypeptide, to substantially maintain the net charge of the XTEN polypeptide, to substantially maintain (or improve) low immunogenicity of the XTEN polypeptide, and to substantially maintain (or improve) the pharmacokinetic properties of the XTEN polypeptide. In some embodiments, the XTEN polypeptide amino acid sequence has at least 90%, at least 92%, at least 95%, at least 98%, at least 99%, or 100% sequence identity to any one of SEQ ID NOs: 676-734 listed in Table 3b. In some embodiments, the XTEN sequence, having at least 90% (e.g., at least 92%, at least 95%, at least 98%, or at least 99%) but less than 100% sequence identity to any of SEQ ID NOs: 676-734 listed in Table 3b, is obtained by one or more mutations (e.g., less than 10, less than 8, less than 6, less than 5, less than 4, less than 3, less than 2 mutations) of the corresponding sequence from Table 3b. In some embodiments, the one or more mutations comprise deletion of a glutamic acid residue, insertion of a glutamic acid residue, substitution of a glutamic acid residue, or substitution for a glutamic acid residue, or any combination thereof. In some embodiments, where the XTEN polypeptide amino acid sequence differs from, but has at least 90% (e.g., at least 92%, at least 95%, at least 98%, or at least 99%) sequence identity to, any one of SEQ ID NOs: 676-734 listed in Table 3b, at least 80%, at least 90%, at least 95%, at least 97%, or about 100% of the difference between the XTEN polypeptide amino acid sequence and the corresponding sequence of Table 3b involve deletion of a glutamic acid residue, insertion of a glutamic acid residue, substitution of a glutamic acid residue, or substitution for a glutamic acid residue, or any combination thereof. In some such embodiments, at least 80%, at least 90%, at least 95%, at least 97%, or about 100% of the difference between the XTEN polypeptide amino acid sequence and the corresponding sequence of Table 3b involve a substitution of a glutamic acid residue, or a substitution for a glutamic acid residue, or both. The term “a substitution of a first amino acid,” as used herein, refers to replacement of the first amino acid residue for a second amino acid residue, resulting in the second amino acid residue taking place at the substitution position in the obtained sequence. For example, “a substitution of glutamic acid” refers to replacement of the glutamic acid (E) residue for a non-glutamic acid residue (e.g., serine (S)). The term “a substitution for a first amino acid,” as used herein, refers to replacement of a second amino acid residue for the first amino acid residue, resulting in the first amino acid residue taking place at the substitution position in the obtained sequence. For example, “a substitution for glutamic acid” refers to replacement of a non-glutamic acid residue (e.g., serine (S)) for a glutamic acid residue.

TABLE 3b
Exemplary General-Purpose XTENs That for Engineering into Barcoded XTEN(s)

| SEQ | XTEN | |
|---|---|---|
| ID NO | Name | Amino Acid Sequence |
| 676 | AE144 | GSEPATSGSETPGTSESATPESGPGSEPATSGSETPGSPAGSPTSTEEGTSTEPSEGSAPGSEP |
| | | ATSGSETPGSEPATSGSETPGSEPATSGSETPGTSTEPSEGSAPGTSESATPESGPGSEPATS |
| | | GSETPGTSTEPSEGSAP |
| 677 | AE144_1A | SPAGSPTSTEEGTSESATPESGPGTSTEPSEGSAPGSPAGSPTSTEEGTSTEPSEGSAPGTSTE |
| | | PSEGSAPGTSESATPESGPGSEPATSGSETPGSEPATSGSETPGSPAGSPTSTEEGTSESATPE |
| | | SGPGTSTEPSEGSAPG |
| 678 | AE144_2A | TSTEPSEGSAPGSPAGSPTSTEEGTSTEPSEGSAPGTSTEPSEGSAPGTSESATPESGPGTSTE |
| | | PSEGSAPGTSESATPESGPGSEPATSGSETPGTSTEPSEGSAPGTSTEPSEGSAPGTSESATPE |
| | | SGPGTSESATPESGPG |
| 679 | AE144_2B | TSTEPSEGSAPGSPAGSPTSTEEGTSTEPSEGSAPGTSTEPSEGSAPGTSESATPESGPGTSTE |
| | | PSEGSAPGTSESATPESGPGSEPATSGSETPGTSTEPSEGSAPGTSTEPSEGSAPGTSESATPE |
| | | SGPGTSESATPESGPG |
| 680 | AE144_3A | SPAGSPTSTEEGTSESATPESGPGSEPATSGSETPGTSESATPESGPGTSTEPSEGSAPGTSTE |
| | | PSEGSAPGTSTEPSEGSAPGTSTEPSEGSAPGTSTEPSEGSAPGTSTEPSEGSAPGSPAGSPTS |
| | | TEEGTSTEPSEGSAPG |
| 681 | AE144_3B | SPAGSPTSTEEGTSESATPESGPGSEPATSGSETPGTSESATPESGPGTSTEPSEGSAPGTSTE |
| | | PSEGSAPGTSTEPSEGSAPGTSTEPSEGSAPGTSTEPSEGSAPGTSTEPSEGSAPGSPAGSPTS |
| | | TEEGTSTEPSEGSAPG |
| 682 | AE144_4A | TSESATPESGPGSEPATSGSETPGTSESATPESGPGSEPATSGSETPGTSESATPESGPGTSTE |
| | | PSEGSAPGTSESATPESGPGSPAGSPTSTEEGSPAGSPTSTEEGSPAGSPTSTEEGTSESATPE |
| | | SGPGTSTEPSEGSAPG |
| 683 | AE144_4B | TSESATPESGPGSEPATSGSETPGTSESATPESGPGSEPATSGSETPGTSESATPESGPGTSTE |
| | | PSEGSAPGTSESATPESGPGSPAGSPTSTEEGSPAGSPTSTEEGSPAGSPTSTEEGTSESATPE |
| | | SGPGTSTEPSEGSAPG |
| 684 | AE144_5A | TSESATPESGPGSEPATSGSETPGTSESATPESGPGSEPATSGSETPGTSESATPESGPGTSTE |
| | | PSEGSAPGSPAGSPTSTEEGTSESATPESGPGSEPATSGSETPGTSESATPESGPGSPAGSPTS |
| | | TEEGSPAGSPTSTEEG |
| 685 | AE144_6B | TSTEPSEGSAPGTSESATPESGPGTSESATPESGPGTSESATPESGPGSEPATSGSETPGSEPA |
| | | TSGSETPGSPAGSPTSTEEGTSTEPSEGSAPGTSTEPSEGSAPGSEPATSGSETPGTSESATPE |
| | | SGPGTSTEPSEGSAPG |
| 686 | AE288_1 | GTSESATPESGPGSEPATSGSETPGTSESATPESGPGSEPATSGSETPGTSESATPESGPGTS |
| | | TEPSEGSAPGSPAGSPTSTEEGTSESATPESGPGSEPATSGSETPGTSESATPESGPGSPAGS |
| | | PTSTEEGSPAGSPTSTEEGTSTEPSEGSAPGTSESATPESGPGTSESATPESGPGTSESATPES |
| | | GPGSEPATSGSETPGSEPATSGSETPGSPAGSPTSTEEGTSTEPSEGSAPGTSTEPSEGSAPG |
| | | SEPATSGSETPGTSESATPESGPGTSTEPSEGSAP |
| 687 | AE288_2 | GSPAGSPTSTEEGTSESATPESGPGSEPATSGSETPGTSESATPESGPGTSTEPSEGSAPGTS |
| | | TEPSEGSAPGTSTEPSEGSAPGTSTEPSEGSAPGTSTEPSEGSAPGTSTEPSEGSAPGSPAGS |
| | | PTSTEEGTSTEPSEGSAPGTSESATPESGPGSEPATSGSETPGTSESATPESGPGSEPATSGSE |
| | | TPGTSESATPESGPGTSTEPSEGSAPGTSESATPESGPGSPAGSPTSTEEGSPAGSPTSTEEGS |
| | | PAGSPTSTEEGTSESATPESGPGTSTEPSEGSAP |
| 688 | AE576 | GSPAGSPTSTEEGTSESATPESGPGTSTEPSEGSAPGSPAGSPTSTEEGTSTEPSEGSAPGTS |
| | | TEPSEGSAPGTSESATPESGPGSEPATSGSETPGSEPATSGSETPGSPAGSPTSTEEGTSESA |
| | | TPESGPGTSTEPSEGSAPGTSTEPSEGSAPGSPAGSPTSTEEGTSTEPSEGSAPGTSTEPSEGS |
| | | APGTSESATPESGPGTSTEPSEGSAPGTSESATPESGPGSEPATSGSETPGTSTEPSEGSAPG |
| | | TSTEPSEGSAPGTSESATPESGPGTSESATPESGPGSPAGSPTSTEEGTSESATPESGPGSEPA |
| | | TSGSETPGTSESATPESGPGTSTEPSEGSAPGTSTEPSEGSAPGTSTEPSEGSAPGTSTEPSEG |
| | | SAPGTSTEPSEGSAPGTSTEPSEGSAPGSPAGSPTSTEEGTSTEPSEGSAPGTSESATPESGP |
| | | GSEPATSGSETPGTSESATPESGPGSEPATSGSETPGTSESATPESGPGTSTEPSEGSAPGTS |
| | | ESATPESGPGSPAGSPTSTEEGSPAGSPTSTEEGSPAGSPTSTEEGTSESATPESGPGTSTEPS |
| | | EGSAP |
| 689 | AE624 | MAEPAGSPTSTEEGTPGSGTASSSPGSSTPSGATGSPGASPGTSSTGSPGSPAGSPTSTEEGT |
| | | SESATPESGPGTSTEPSEGSAPGSPAGSPTSTEEGTSTEPSEGSAPGTSTEPSEGSAPGTSESA |
| | | TPESGPGSEPATSGSETPGSEPATSGSETPGSPAGSPTSTEEGTSESATPESGPGTSTEPSEGS |
| | | APGTSTEPSEGSAPGSPAGSPTSTEEGTSTEPSEGSAPGTSTEPSEGSAPGTSESATPESGPG |
| | | TSTEPSEGSAPGTSESATPESGPGSEPATSGSETPGTSTEPSEGSAPGTSTEPSEGSAPGTSES |
| | | ATPESGPGTSESATPESGPGSPAGSPTSTEEGTSESATPESGPGSEPATSGSETPGTSESATP |
| | | ESGPGTSTEPSEGSAPGTSTEPSEGSAPGTSTEPSEGSAPGTSTEPSEGSAPGTSTEPSEGSAP |
| | | GTSTEPSEGSAPGSPAGSPTSTEEGTSTEPSEGSAPGTSESATPESGPGSEPATSGSETPGTS |
| | | ESATPESGPGSEPATSGSETPGTSESATPESGPGTSTEPSEGSAPGTSESATPESGPGSPAGS |
| | | PTSTEEGSPAGSPTSTEEGSPAGSPTSTEEGTSESATPESGPGTSTEPSEGSAP |
| 690 | AE864 | GSPAGSPTSTEEGTSESATPESGPGTSTEPSEGSAPGSPAGSPTSTEEGTSTEPSEGSAPGTS |
| | | TEPSEGSAPGTSESATPESGPGSEPATSGSETPGSEPATSGSETPGSPAGSPTSTEEGTSESA |
| | | TPESGPGTSTEPSEGSAPGTSTEPSEGSAPGSPAGSPTSTEEGTSTEPSEGSAPGTSTEPSEGS |
| | | APGTSESATPESGPGTSTEPSEGSAPGTSESATPESGPGSEPATSGSETPGTSTEPSEGSAPG |
| | | TSTEPSEGSAPGTSESATPESGPGTSESATPESGPGSPAGSPTSTEEGTSESATPESGPGSEPA |
| | | TSGSETPGTSESATPESGPGTSTEPSEGSAPGTSTEPSEGSAPGTSTEPSEGSAPGTSTEPSEG |
| | | SAPGTSTEPSEGSAPGTSTEPSEGSAPGSPAGSPTSTEEGTSTEPSEGSAPGTSESATPESGP |
| | | GSEPATSGSETPGTSESATPESGPGSEPATSGSETPGTSESATPESGPGTSTEPSEGSAPGTS |
| | | ESATPESGPGSPAGSPTSTEEGSPAGSPTSTEEGSPAGSPTSTEEGTSESATPESGPGTSTEPS |
| | | EGSAPGTSESATPESGPGSEPATSGSETPGTSESATPESGPGSEPATSGSETPGTSESATPES |
| | | GPGTSTEPSEGSAPGSPAGSPTSTEEGTSESATPESGPGSEPATSGSETPGTSESATPESGPG |
| | | SPAGSPTSTEEGSPAGSPTSTEEGTSTEPSEGSAPGTSESATPESGPGTSESATPESGPGTSES |
| | | ATPESGPGSEPATSGSETPGSEPATSGSETPGSPAGSPTSTEEGTSTEPSEGSAPGTSTEPSE |
| | | GSAPGSEPATSGSETPGTSESATPESGPGTSTEPSEGSAP |
| 691 | AE865 | GGSPAGSPTSTEEGTSESATPESGPGTSTEPSEGSAPGSPAGSPTSTEEGTSTEPSEGSAPGT |
| | | STEPSEGSAPGTSESATPESGPGSEPATSGSETPGSEPATSGSETPGSPAGSPTSTEEGTSESA |
| | | TPESGPGTSTEPSEGSAPGTSTEPSEGSAPGSPAGSPTSTEEGTSTEPSEGSAPGTSTEPSEGS |
| | | APGTSESATPESGPGTSTEPSEGSAPGTSESATPESGPGSEPATSGSETPGTSTEPSEGSAPG |
| | | TSTEPSEGSAPGTSESATPESGPGTSESATPESGPGSPAGSPTSTEEGTSESATPESGPGSEPA |
| | | TSGSETPGTSESATPESGPGTSTEPSEGSAPGTSTEPSEGSAPGTSTEPSEGSAPGTSTEPSEG |
| | | SAPGTSTEPSEGSAPGTSTEPSEGSAPGSPAGSPTSTEEGTSTEPSEGSAPGTSESATPESGP |
| | | GSEPATSGSETPGTSESATPESGPGSEPATSGSETPGTSESATPESGPGTSTEPSEGSAPGTS |
| | | ESATPESGPGSPAGSPTSTEEGSPAGSPTSTEEGSPAGSPTSTEEGTSESATPESGPGTSTEPS |
| | | EGSAPGTSESATPESGPGSEPATSGSETPGTSESATPESGPGSEPATSGSETPGTSESATPES |
| | | GPGTSTEPSEGSAPGSPAGSPTSTEEGTSESATPESGPGSEPATSGSETPGTSESATPESGPG |
| | | SPAGSPTSTEEGSPAGSPTSTEEGTSTEPSEGSAPGTSESATPESGPGTSESATPESGPGTSES |
| | | ATPESGPGSEPATSGSETPGSEPATSGSETPGSPAGSPTSTEEGTSTEPSEGSAPGTSTEPSE |
| | | GSAPGSEPATSGSETPGTSESATPESGPGTSTEPSEGSAP |
| 692 | AE866 | PGSPAGSPTSTEEGTSESATPESGPGTSTEPSEGSAPGSPAGSPTSTEEGTSTEPSEGSAPGTS |
| | | TEPSEGSAPGTSESATPESGPGSEPATSGSETPGSEPATSGSETPGSPAGSPTSTEEGTSESA |
| | | TPESGPGTSTEPSEGSAPGTSTEPSEGSAPGSPAGSPTSTEEGTSTEPSEGSAPGTSTEPSEGS |
| | | APGTSESATPESGPGTSTEPSEGSAPGTSESATPESGPGSEPATSGSETPGTSTEPSEGSAPG |
| | | TSTEPSEGSAPGTSESATPESGPGTSESATPESGPGSPAGSPTSTEEGTSESATPESGPGSEPA |
| | | TSGSETPGTSESATPESGPGTSTEPSEGSAPGTSTEPSEGSAPGTSTEPSEGSAPGTSTEPSEG |
| | | SAPGTSTEPSEGSAPGTSTEPSEGSAPGSPAGSPTSTEEGTSTEPSEGSAPGTSESATPESGP |
| | | GSEPATSGSETPGTSESATPESGPGSEPATSGSETPGTSESATPESGPGTSTEPSEGSAPGTS |
| | | ESATPESGPGSPAGSPTSTEEGSPAGSPTSTEEGSPAGSPTSTEEGTSESATPESGPGTSTEPS |
| | | EGSAPGTSESATPESGPGSEPATSGSETPGTSESATPESGPGSEPATSGSETPGTSESATPES |
| | | GPGTSTEPSEGSAPGSPAGSPTSTEEGTSESATPESGPGSEPATSGSETPGTSESATPESGPG |
| | | SPAGSPTSTEEGSPAGSPTSTEEGTSTEPSEGSAPGTSESATPESGPGTSESATPESGPGTSES |
| | | ATPESGPGSEPATSGSETPGSEPATSGSETPGSPAGSPTSTEEGTSTEPSEGSAPGTSTEPSE |
| | | GSAPGSEPATSGSETPGTSESATPESGPGTSTEPSEGSAPG |
| 693 | AE115 | GSPAGSPTSTEEGTSESATPESGPGTSTEPSEGSAPGSPAGSPTSTEEGTSTEPSEGSAPGTS |
| | 2 | TEPSEGSAPGTSESATPESGPGSEPATSGSETPGSEPATSGSETPGSPAGSPTSTEEGTSESA |
| | | TPESGPGTSTEPSEGSAPGTSTEPSEGSAPGSPAGSPTSTEEGTSTEPSEGSAPGTSTEPSEGS |
| | | APGTSESATPESGPGTSTEPSEGSAPGTSESATPESGPGSEPATSGSETPGTSTEPSEGSAPG |
| | | TSTEPSEGSAPGTSESATPESGPGTSESATPESGPGSPAGSPTSTEEGTSESATPESGPGSEPA |
| | | TSGSETPGTSESATPESGPGTSTEPSEGSAPGTSTEPSEGSAPGTSTEPSEGSAPGTSTEPSEG |
| | | SAPGTSTEPSEGSAPGTSTEPSEGSAPGSPAGSPTSTEEGTSTEPSEGSAPGTSESATPESGP |
| | | GSEPATSGSETPGTSESATPESGPGSEPATSGSETPGTSESATPESGPGTSTEPSEGSAPGTS |
| | | ESATPESGPGSPAGSPTSTEEGSPAGSPTSTEEGSPAGSPTSTEEGTSESATPESGPGTSTEPS |
| | | EGSAPGTSESATPESGPGSEPATSGSETPGTSESATPESGPGSEPATSGSETPGTSESATPES |
| | | GPGTSTEPSEGSAPGSPAGSPTSTEEGTSESATPESGPGSEPATSGSETPGTSESATPESGPG |
| | | SPAGSPTSTEEGSPAGSPTSTEEGTSTEPSEGSAPGTSESATPESGPGTSESATPESGPGTSES |
| | | ATPESGPGSEPATSGSETPGSEPATSGSETPGSPAGSPTSTEEGTSTEPSEGSAPGTSTEPSE |
| | | GSAPGSEPATSGSETPGTSESATPESGPGTSTEPSEGSAPGTSESATPESGPGSEPATSGSET |
| | | PGTSESATPESGPGSEPATSGSETPGTSESATPESGPGTSTEPSEGSAPGSPAGSPTSTEEGTS |
| | | ESATPESGPGSEPATSGSETPGTSESATPESGPGSPAGSPTSTEEGSPAGSPTSTEEGTSTEPS |
| | | EGSAPGTSESATPESGPGTSESATPESGPGTSESATPESGPGSEPATSGSETPGSEPATSGSE |
| | | TPGSPAGSPTSTEEGTSTEPSEGSAPGTSTEPSEGSAPGSEPATSGSETPGTSESATPESGPG |
| | | TSTEPSEGSAP |
| 694 | AE144 | STEPSEGSAPGSPAGSPTSTEEGTSTEPSEGSAPGTSESATPESGPGSEPATSGSETPGTSESA |
| | A | TPESGPGSEPATSGSETPGTSESATPESGPGTSTEPSEGSAPGTSESATPESGPGSPAGSPTST |
| | | EEGSPAGSPTSTEEGS |
| 695 | AE144 | SEPATSGSETPGTSESATPESGPGSEPATSGSETPGTSESATPESGPGTSTEPSEGSAPGSPA |
| | B | GSPTSTEEGTSESATPESGPGSEPATSGSETPGTSESATPESGPGSPAGSPTSTEEGSPAGSPT |
| | | STEEGTSTEPSEGSAPG |
| 696 | AE180 | TSTEEGTSESATPESGPGSEPATSGSETPGTSESATPESGPGSPAGSPTSTEEGSPAGSPTSTE |
| | A | EGTSTEPSEGSAPGTSESATPESGPGTSESATPESGPGTSESATPESGPGSEPATSGSETPGS |
| | | EPATSGSETPGSPAGSPTSTEEGTSTEPSEGSAPGTSTEPSEGSAPGSEPATS |
| 697 | AE216 | PESGPGTSTEPSEGSAPGSPAGSPTSTEEGTSESATPESGPGSEPATSGSETPGTSESATPESG |
| | A | PGSPAGSPTSTEEGSPAGSPTSTEEGTSTEPSEGSAPGTSESATPESGPGTSESATPESGPGTS |
| | | ESATPESGPGSEPATSGSETPGSEPATSGSETPGSPAGSPTSTEEGTSTEPSEGSAPGTSTEPS |
| | | EGSAPGSEPATSGSETPGTSESAT |
| 698 | AE252 | ESGPGSEPATSGSETPGTSESATPESGPGTSTEPSEGSAPGSPAGSPTSTEEGTSESATPESGP |
| | A | GSEPATSGSETPGTSESATPESGPGSPAGSPTSTEEGSPAGSPTSTEEGTSTEPSEGSAPGTS |
| | | ESATPESGPGTSESATPESGPGTSESATPESGPGSEPATSGSETPGSEPATSGSETPGSPAGS |
| | | PTSTEEGTSTEPSEGSAPGTSTEPSEGSAPGSEPATSGSETPGTSESATPESGPGTSTEPSE |
| 699 | AE288 | TPESGPGTSTEPSEGSAPGTSESATPESGPGSEPATSGSETPGTSESATPESGPGSEPATSGSE |
| | A | TPGTSESATPESGPGTSTEPSEGSAPGSPAGSPTSTEEGTSESATPESGPGSEPATSGSETPG |
| | | TSESATPESGPGSPAGSPTSTEEGSPAGSPTSTEEGTSTEPSEGSAPGTSESATPESGPGTSES |
| | | ATPESGPGTSESATPESGPGSEPATSGSETPGSEPATSGSETPGSPAGSPTSTEEGTSTEPSE |
| | | GSAPGTSTEPSEGSAPGSEPATSGSETPGTSESA |
| 700 | AE324 | PESGPGSPAGSPTSTEEGSPAGSPTSTEEGSPAGSPTSTEEGTSESATPESGPGTSTEPSEGSA |
| | A | PGTSESATPESGPGSEPATSGSETPGTSESATPESGPGSEPATSGSETPGTSESATPESGPGTS |
| | | TEPSEGSAPGSPAGSPTSTEEGTSESATPESGPGSEPATSGSETPGTSESATPESGPGSPAGS |
| | | PTSTEEGSPAGSPTSTEEGTSTEPSEGSAPGTSESATPESGPGTSESATPESGPGTSESATPES |
| | | GPGSEPATSGSETPGSEPATSGSETPGSPAGSPTSTEEGTSTEPSEGSAPGTSTEPSEGSAPG |
| | | SEPATS |
| 701 | AE360 | PESGPGTSTEPSEGSAPGTSESATPESGPGSPAGSPTSTEEGSPAGSPTSTEEGSPAGSPTSTE |
| | A | EGTSESATPESGPGTSTEPSEGSAPGTSESATPESGPGSEPATSGSETPGTSESATPESGPGS |
| | | EPATSGSETPGTSESATPESGPGTSTEPSEGSAPGSPAGSPTSTEEGTSESATPESGPGSEPA |
| | | TSGSETPGTSESATPESGPGSPAGSPTSTEEGSPAGSPTSTEEGTSTEPSEGSAPGTSESATPE |
| | | SGPGTSESATPESGPGTSESATPESGPGSEPATSGSETPGSEPATSGSETPGSPAGSPTSTEE |
| | | GTSTEPSEGSAPGTSTEPSEGSAPGSEPATSGSETPGTSESAT |
| 702 | AE396 | PESGPGSEPATSGSETPGTSESATPESGPGTSTEPSEGSAPGTSESATPESGPGSPAGSPTSTE |
| | A | EGSPAGSPTSTEEGSPAGSPTSTEEGTSESATPESGPGTSTEPSEGSAPGTSESATPESGPGS |
| | | EPATSGSETPGTSESATPESGPGSEPATSGSETPGTSESATPESGPGTSTEPSEGSAPGSPAG |
| | | SPTSTEEGTSESATPESGPGSEPATSGSETPGTSESATPESGPGSPAGSPTSTEEGSPAGSPTS |
| | | TEEGTSTEPSEGSAPGTSESATPESGPGTSESATPESGPGTSESATPESGPGSEPATSGSETP |
| | | GSEPATSGSETPGSPAGSPTSTEEGTSTEPSEGSAPGTSTEPS |
| 703 | AE432 | EGSAPGSPAGSPTSTEEGTSTEPSEGSAPGTSESATPESGPGSEPATSGSETPGTSESATPES |
| | A | GPGSEPATSGSETPGTSESATPESGPGTSTEPSEGSAPGTSESATPESGPGSPAGSPTSTEEG |
| | | SPAGSPTSTEEGSPAGSPTSTEEGTSESATPESGPGTSTEPSEGSAPGTSESATPESGPGSEPA |
| | | TSGSETPGTSESATPESGPGSEPATSGSETPGTSESATPESGPGTSTEPSEGSAPGSPAGSPTS |
| | | TEEGTSESATPESGPGSEPATSGSETPGTSESATPESGPGSPAGSPTSTEEGSPAGSPTSTEE |
| | | GTSTEPSEGSAPGTSESATPESGPGTSESATPESGPGTSESATPESGPGSEPATSGSETPGSEP |
| | | ATSGSETPGSPAGSPTSTEEGTSTEPSEGSAPGTSTEPSEGSAPGSEPATS |
| 704 | AE468 | EGSAPGTSTEPSEGSAPGTSTEPSEGSAPGSPAGSPTSTEEGTSTEPSEGSAPGTSESATPES |
| | A | GPGSEPATSGSETPGTSESATPESGPGSEPATSGSETPGTSESATPESGPGTSTEPSEGSAPG |
| | | TSESATPESGPGSPAGSPTSTEEGSPAGSPTSTEEGSPAGSPTSTEEGTSESATPESGPGTSTE |
| | | PSEGSAPGTSESATPESGPGSEPATSGSETPGTSESATPESGPGSEPATSGSETPGTSESATPE |
| | | SGPGTSTEPSEGSAPGSPAGSPTSTEEGTSESATPESGPGSEPATSGSETPGTSESATPESGP |
| | | GSPAGSPTSTEEGSPAGSPTSTEEGTSTEPSEGSAPGTSESATPESGPGTSESATPESGPGTS |
| | | ESATPESGPGSEPATSGSETPGSEPATSGSETPGSPAGSPTSTEEGTSTEPSEGSAPGTSTEPS |
| | | EGSAPGSEPATSGSETPGTSESAT |
| 705 | AE504 | EGSAPGTSTEPSEGSAPGTSTEPSEGSAPGTSTEPSEGSAPGTSTEPSEGSAPGSPAGSPTST |
| | A | EEGTSTEPSEGSAPGTSESATPESGPGSEPATSGSETPGTSESATPESGPGSEPATSGSETPG |
| | | TSESATPESGPGTSTEPSEGSAPGTSESATPESGPGSPAGSPTSTEEGSPAGSPTSTEEGSPA |
| | | GSPTSTEEGTSESATPESGPGTSTEPSEGSAPGTSESATPESGPGSEPATSGSETPGTSESATP |
| | | ESGPGSEPATSGSETPGTSESATPESGPGTSTEPSEGSAPGSPAGSPTSTEEGTSESATPESGP |
| | | GSEPATSGSETPGTSESATPESGPGSPAGSPTSTEEGSPAGSPTSTEEGTSTEPSEGSAPGTS |
| | | ESATPESGPGTSESATPESGPGTSESATPESGPGSEPATSGSETPGSEPATSGSETPGSPAGS |
| | | PTSTEEGTSTEPSEGSAPGTSTEPSEGSAPGSEPATSGSETPGTSESATPESGPGTSTEPS |
| 706 | AE540 | TPESGPGSPAGSPTSTEEGTSESATPESGPGSEPATSGSETPGTSESATPESGPGTSTEPSEGS |
| | A | APGTSTEPSEGSAPGTSTEPSEGSAPGTSTEPSEGSAPGTSTEPSEGSAPGTSTEPSEGSAPG |
| | | SPAGSPTSTEEGTSTEPSEGSAPGTSESATPESGPGSEPATSGSETPGTSESATPESGPGSEPA |
| | | TSGSETPGTSESATPESGPGTSTEPSEGSAPGTSESATPESGPGSPAGSPTSTEEGSPAGSPTS |
| | | TEEGSPAGSPTSTEEGTSESATPESGPGTSTEPSEGSAPGTSESATPESGPGSEPATSGSETP |
| | | GTSESATPESGPGSEPATSGSETPGTSESATPESGPGTSTEPSEGSAPGSPAGSPTSTEEGTS |
| | | ESATPESGPGSEPATSGSETPGTSESATPESGPGSPAGSPTSTEEGSPAGSPTSTEEGTSTEPS |
| | | EGSAPGTSESATPESGPGTSESATPESGPGTSESATPESGPGSEPATSGSETPGSEPATSGSE |
| | | TPGSPAGSPTSTEEGTSTEPSEGSAPGTSTEP |
| 707 | AE576 | TPESGPGTSESATPESGPGSPAGSPTSTEEGTSESATPESGPGSEPATSGSETPGTSESATPES |
| | A | GPGTSTEPSEGSAPGTSTEPSEGSAPGTSTEPSEGSAPGTSTEPSEGSAPGTSTEPSEGSAPG |
| | | TSTEPSEGSAPGSPAGSPTSTEEGTSTEPSEGSAPGTSESATPESGPGSEPATSGSETPGTSES |
| | | ATPESGPGSEPATSGSETPGTSESATPESGPGTSTEPSEGSAPGTSESATPESGPGSPAGSPT |
| | | STEEGSPAGSPTSTEEGSPAGSPTSTEEGTSESATPESGPGTSTEPSEGSAPGTSESATPESGP |
| | | GSEPATSGSETPGTSESATPESGPGSEPATSGSETPGTSESATPESGPGTSTEPSEGSAPGSP |
| | | AGSPTSTEEGTSESATPESGPGSEPATSGSETPGTSESATPESGPGSPAGSPTSTEEGSPAGS |
| | | PTSTEEGTSTEPSEGSAPGTSESATPESGPGTSESATPESGPGTSESATPESGPGSEPATSGSE |
| | | TPGSEPATSGSETPGSPAGSPTSTEEGTSTEPSEGSAPGTSTEPSEGSAPGSEPATSGSETPG |
| | | TSESA |
| 708 | AE612 | GSETPGTSTEPSEGSAPGTSTEPSEGSAPGTSESATPESGPGTSESATPESGPGSPAGSPTSTE |
| | A | EGTSESATPESGPGSEPATSGSETPGTSESATPESGPGTSTEPSEGSAPGTSTEPSEGSAPGT |
| | | STEPSEGSAPGTSTEPSEGSAPGTSTEPSEGSAPGTSTEPSEGSAPGSPAGSPTSTEEGTSTEP |
| | | SEGSAPGTSESATPESGPGSEPATSGSETPGTSESATPESGPGSEPATSGSETPGTSESATPES |
| | | GPGTSTEPSEGSAPGTSESATPESGPGSPAGSPTSTEEGSPAGSPTSTEEGSPAGSPTSTEEG |
| | | TSESATPESGPGTSTEPSEGSAPGTSESATPESGPGSEPATSGSETPGTSESATPESGPGSEPA |
| | | TSGSETPGTSESATPESGPGTSTEPSEGSAPGSPAGSPTSTEEGTSESATPESGPGSEPATSGS |
| | | ETPGTSESATPESGPGSPAGSPTSTEEGSPAGSPTSTEEGTSTEPSEGSAPGTSESATPESGP |
| | | GTSESATPESGPGTSESATPESGPGSEPATSGSETPGSEPATSGSETPGSPAGSPTSTEEGTS |
| | | TEPSEGSAPGTSTEPSEGSAPGSEPATSGSETPGTSESAT |
| 709 | AE648 | PESGPGTSTEPSEGSAPGTSESATPESGPGSEPATSGSETPGTSTEPSEGSAPGTSTEPSEGSA |
| | A | PGTSESATPESGPGTSESATPESGPGSPAGSPTSTEEGTSESATPESGPGSEPATSGSETPGTS |
| | | ESATPESGPGTSTEPSEGSAPGTSTEPSEGSAPGTSTEPSEGSAPGTSTEPSEGSAPGTSTEPS |
| | | EGSAPGTSTEPSEGSAPGSPAGSPTSTEEGTSTEPSEGSAPGTSESATPESGPGSEPATSGSE |
| | | TPGTSESATPESGPGSEPATSGSETPGTSESATPESGPGTSTEPSEGSAPGTSESATPESGPGS |
| | | PAGSPTSTEEGSPAGSPTSTEEGSPAGSPTSTEEGTSESATPESGPGTSTEPSEGSAPGTSES |
| | | ATPESGPGSEPATSGSETPGTSESATPESGPGSEPATSGSETPGTSESATPESGPGTSTEPSE |
| | | GSAPGSPAGSPTSTEEGTSESATPESGPGSEPATSGSETPGTSESATPESGPGSPAGSPTSTE |
| | | EGSPAGSPTSTEEGTSTEPSEGSAPGTSESATPESGPGTSESATPESGPGTSESATPESGPGS |
| | | EPATSGSETPGSEPATSGSETPGSPAGSPTSTEEGTSTEPSEGSAPGTSTEPSEGSAPGSEPA |
| | | TSGSETPGTSESAT |
| 710 | AE684 | EGSAPGSPAGSPTSTEEGTSTEPSEGSAPGTSTEPSEGSAPGTSESATPESGPGTSTEPSEGS |
| | A | APGTSESATPESGPGSEPATSGSETPGTSTEPSEGSAPGTSTEPSEGSAPGTSESATPESGPG |
| | | TSESATPESGPGSPAGSPTSTEEGTSESATPESGPGSEPATSGSETPGTSESATPESGPGTSTE |
| | | PSEGSAPGTSTEPSEGSAPGTSTEPSEGSAPGTSTEPSEGSAPGTSTEPSEGSAPGTSTEPSEG |
| | | SAPGSPAGSPTSTEEGTSTEPSEGSAPGTSESATPESGPGSEPATSGSETPGTSESATPESGP |
| | | GSEPATSGSETPGTSESATPESGPGTSTEPSEGSAPGTSESATPESGPGSPAGSPTSTEEGSP |
| | | AGSPTSTEEGSPAGSPTSTEEGTSESATPESGPGTSTEPSEGSAPGTSESATPESGPGSEPAT |
| | | SGSETPGTSESATPESGPGSEPATSGSETPGTSESATPESGPGTSTEPSEGSAPGSPAGSPTST |
| | | EEGTSESATPESGPGSEPATSGSETPGTSESATPESGPGSPAGSPTSTEEGSPAGSPTSTEEG |
| | | TSTEPSEGSAPGTSESATPESGPGTSESATPESGPGTSESATPESGPGSEPATSGSETPGSEPA |
| | | TSGSETPGSPAGSPTSTEEGTSTEPSEGSAPGTSTEPSEGSAPGSEPATS |
| 711 | AE720 | TSGSETPGSEPATSGSETPGSPAGSPTSTEEGTSESATPESGPGTSTEPSEGSAPGTSTEPSEG |
| | A | SAPGSPAGSPTSTEEGTSTEPSEGSAPGTSTEPSEGSAPGTSESATPESGPGTSTEPSEGSAP |
| | | GTSESATPESGPGSEPATSGSETPGTSTEPSEGSAPGTSTEPSEGSAPGTSESATPESGPGTS |
| | | ESATPESGPGSPAGSPTSTEEGTSESATPESGPGSEPATSGSETPGTSESATPESGPGTSTEPS |
| | | EGSAPGTSTEPSEGSAPGTSTEPSEGSAPGTSTEPSEGSAPGTSTEPSEGSAPGTSTEPSEGS |
| | | APGSPAGSPTSTEEGTSTEPSEGSAPGTSESATPESGPGSEPATSGSETPGTSESATPESGPG |
| | | SEPATSGSETPGTSESATPESGPGTSTEPSEGSAPGTSESATPESGPGSPAGSPTSTEEGSPA |
| | | GSPTSTEEGSPAGSPTSTEEGTSESATPESGPGTSTEPSEGSAPGTSESATPESGPGSEPATS |
| | | GSETPGTSESATPESGPGSEPATSGSETPGTSESATPESGPGTSTEPSEGSAPGSPAGSPTSTE |
| | | EGTSESATPESGPGSEPATSGSETPGTSESATPESGPGSPAGSPTSTEEGSPAGSPTSTEEGT |
| | | STEPSEGSAPGTSESATPESGPGTSESATPESGPGTSESATPESGPGSEPATSGSETPGSEPAT |
| | | SGSETPGSPAGSPTSTEEGTSTE |
| 712 | AE756 | TSGSETPGSEPATSGSETPGSPAGSPTSTEEGTSESATPESGPGTSTEPSEGSAPGTSTEPSEG |
| | A | SAPGSPAGSPTSTEEGTSTEPSEGSAPGTSTEPSEGSAPGTSESATPESGPGTSTEPSEGSAP |
| | | GTSESATPESGPGSEPATSGSETPGTSTEPSEGSAPGTSTEPSEGSAPGTSESATPESGPGTS |
| | | ESATPESGPGSPAGSPTSTEEGTSESATPESGPGSEPATSGSETPGTSESATPESGPGTSTEPS |
| | | EGSAPGTSTEPSEGSAPGTSTEPSEGSAPGTSTEPSEGSAPGTSTEPSEGSAPGTSTEPSEGS |
| | | APGSPAGSPTSTEEGTSTEPSEGSAPGTSESATPESGPGSEPATSGSETPGTSESATPESGPG |
| | | SEPATSGSETPGTSESATPESGPGTSTEPSEGSAPGTSESATPESGPGSPAGSPTSTEEGSPA |
| | | GSPTSTEEGSPAGSPTSTEEGTSESATPESGPGTSTEPSEGSAPGTSESATPESGPGSEPATS |
| | | GSETPGTSESATPESGPGSEPATSGSETPGTSESATPESGPGTSTEPSEGSAPGSPAGSPTSTE |
| | | EGTSESATPESGPGSEPATSGSETPGTSESATPESGPGSPAGSPTSTEEGSPAGSPTSTEEGT |
| | | STEPSEGSAPGTSESATPESGPGTSESATPESGPGTSESATPESGPGSEPATSGSETPGSEPAT |
| | | SGSETPGSPAGSPTSTEEGTSTEPSEGSAPGTSTEPSEGSAPGSEPATSGSETPGTSES |
| 713 | AE792 | EGSAPGTSESATPESGPGSEPATSGSETPGSEPATSGSETPGSPAGSPTSTEEGTSESATPES |
| | A | GPGTSTEPSEGSAPGTSTEPSEGSAPGSPAGSPTSTEEGTSTEPSEGSAPGTSTEPSEGSAPG |
| | | TSESATPESGPGTSTEPSEGSAPGTSESATPESGPGSEPATSGSETPGTSTEPSEGSAPGTSTE |
| | | PSEGSAPGTSESATPESGPGTSESATPESGPGSPAGSPTSTEEGTSESATPESGPGSEPATSG |
| | | SETPGTSESATPESGPGTSTEPSEGSAPGTSTEPSEGSAPGTSTEPSEGSAPGTSTEPSEGSAP |
| | | GTSTEPSEGSAPGTSTEPSEGSAPGSPAGSPTSTEEGTSTEPSEGSAPGTSESATPESGPGSEP |
| | | ATSGSETPGTSESATPESGPGSEPATSGSETPGTSESATPESGPGTSTEPSEGSAPGTSESAT |
| | | PESGPGSPAGSPTSTEEGSPAGSPTSTEEGSPAGSPTSTEEGTSESATPESGPGTSTEPSEGSA |
| | | PGTSESATPESGPGSEPATSGSETPGTSESATPESGPGSEPATSGSETPGTSESATPESGPGTS |
| | | TEPSEGSAPGSPAGSPTSTEEGTSESATPESGPGSEPATSGSETPGTSESATPESGPGSPAGS |
| | | PTSTEEGSPAGSPTSTEEGTSTEPSEGSAPGTSESATPESGPGTSESATPESGPGTSESATPES |
| | | GPGSEPATSGSETPGSEPATSGSETPGSPAGSPTSTEEGTSTEPSEGSAPGTSTEPSEGSAPG |
| | | SEPATSGSETPGTSESATPESGPGTSTEPS |
| 714 | AE828 | PESGPGTSTEPSEGSAPGSPAGSPTSTEEGTSTEPSEGSAPGTSTEPSEGSAPGTSESATPESG |
| | A | PGSEPATSGSETPGSEPATSGSETPGSPAGSPTSTEEGTSESATPESGPGTSTEPSEGSAPGTS |
| | | TEPSEGSAPGSPAGSPTSTEEGTSTEPSEGSAPGTSTEPSEGSAPGTSESATPESGPGTSTEPS |
| | | EGSAPGTSESATPESGPGSEPATSGSETPGTSTEPSEGSAPGTSTEPSEGSAPGTSESATPES |
| | | GPGTSESATPESGPGSPAGSPTSTEEGTSESATPESGPGSEPATSGSETPGTSESATPESGPG |
| | | TSTEPSEGSAPGTSTEPSEGSAPGTSTEPSEGSAPGTSTEPSEGSAPGTSTEPSEGSAPGTSTE |
| | | PSEGSAPGSPAGSPTSTEEGTSTEPSEGSAPGTSESATPESGPGSEPATSGSETPGTSESATPE |
| | | SGPGSEPATSGSETPGTSESATPESGPGTSTEPSEGSAPGTSESATPESGPGSPAGSPTSTEE |
| | | GSPAGSPTSTEEGSPAGSPTSTEEGTSESATPESGPGTSTEPSEGSAPGTSESATPESGPGSEP |
| | | ATSGSETPGTSESATPESGPGSEPATSGSETPGTSESATPESGPGTSTEPSEGSAPGSPAGSP |
| | | TSTEEGTSESATPESGPGSEPATSGSETPGTSESATPESGPGSPAGSPTSTEEGSPAGSPTSTE |
| | | EGTSTEPSEGSAPGTSESATPESGPGTSESATPESGPGTSESATPESGPGSEPATSGSETPGS |
| | | EPATSGSETPGSPAGSPTSTEEGTSTEPSEGSAPGTSTEPSEGSAPGSEPATSGSETPGTSES |
| | | AT |
| 715 | AE869 | GSPGSPAGSPTSTEEGTSESATPESGPGTSTEPSEGSAPGSPAGSPTSTEEGTSTEPSEGSAP |
| | | GTSTEPSEGSAPGTSESATPESGPGSEPATSGSETPGSEPATSGSETPGSPAGSPTSTEEGTS |
| | | ESATPESGPGTSTEPSEGSAPGTSTEPSEGSAPGSPAGSPTSTEEGTSTEPSEGSAPGTSTEPS |
| | | EGSAPGTSESATPESGPGTSTEPSEGSAPGTSESATPESGPGSEPATSGSETPGTSTEPSEGS |
| | | APGTSTEPSEGSAPGTSESATPESGPGTSESATPESGPGSPAGSPTSTEEGTSESATPESGPG |
| | | SEPATSGSETPGTSESATPESGPGTSTEPSEGSAPGTSTEPSEGSAPGTSTEPSEGSAPGTSTE |
| | | PSEGSAPGTSTEPSEGSAPGTSTEPSEGSAPGSPAGSPTSTEEGTSTEPSEGSAPGTSESATPE |
| | | SGPGSEPATSGSETPGTSESATPESGPGSEPATSGSETPGTSESATPESGPGTSTEPSEGSAP |
| | | GTSESATPESGPGSPAGSPTSTEEGSPAGSPTSTEEGSPAGSPTSTEEGTSESATPESGPGTS |
| | | TEPSEGSAPGTSESATPESGPGSEPATSGSETPGTSESATPESGPGSEPATSGSETPGTSESA |
| | | TPESGPGTSTEPSEGSAPGSPAGSPTSTEEGTSESATPESGPGSEPATSGSETPGTSESATPES |
| | | GPGSPAGSPTSTEEGSPAGSPTSTEEGTSTEPSEGSAPGTSESATPESGPGTSESATPESGPG |
| | | TSESATPESGPGSEPATSGSETPGSEPATSGSETPGSPAGSPTSTEEGTSTEPSEGSAPGTSTE |
| | | PSEGSAPGSEPATSGSETPGTSESATPESGPGTSTEPSEGSAPGR |
| 716 | AE144_R1 | SAGSPGSPAGSPTSTEEGTSESATPESGPGTSTEPSEGSAPGSPAGSPTSTEEGTSTEPSEGS |
| | | APGTSTEPSEGSAPGTSESATPESGPGSEPATSGSETPGSEPATSGSETPGSPAGSPTSTEEG |
| | | TSESATPESGPGTESASR |
| 717 | AE288_R1 | SAGSPTGPGSEPATSGSETPGTSESATPESGPGSEPATSGSETPGTSESATPESGPGTSTEPSE |
| | | GSAPGSPAGSPTSTEEGTSESATPESGPGSEPATSGSETPGTSESATPESGPGSPAGSPTSTE |
| | | EGSPAGSPTSTEEGTSTEPSEGSAPGTSESATPESGPGTSESATPESGPGTSESATPESGPGS |
| | | EPATSGSETPGSEPATSGSETPGSPAGSPTSTEEGTSTEPSEGSAPGTSTEPSEGSAPGSEPA |
| | | TSGSETPGTSESATPESGPGTSTEPSEGSAPSASR |
| 718 | AE432_R1 | SAGSPGSPAGSPTSTEEGTSESATPESGPGTSTEPSEGSAPGSPAGSPTSTEEGTSTEPSEGS |
| | | APGTSTEPSEGSAPGTSESATPESGPGSEPATSGSETPGSEPATSGSETPGSPAGSPTSTEEG |
| | | TSESATPESGPGTSTEPSEGSAPGTSTEPSEGSAPGSPAGSPTSTEEGTSTEPSEGSAPGTSTE |
| | | PSEGSAPGTSESATPESGPGTSTEPSEGSAPGTSESATPESGPGSEPATSGSETPGTSTEPSEG |
| | | SAPGTSTEPSEGSAPGTSESATPESGPGTSESATPESGPGSPAGSPTSTEEGTSESATPESGP |
| | | GSEPATSGSETPGTSESATPESGPGTSTEPSEGSAPGTSTEPSEGSAPGTSTEPSEGSAPGTS |
| | | TEPSEGSAPGTSTEPSEGSAPGTSTEPSEGSAPGSPAGSPTSTEEGTESASR |
| 719 | AE576_R1 | SAGSPTEEGTSESATPESGPGSEPATSGSETPGTSESATPESGPGTSTEPSEGSAPGTSTEPSE |
| | | GSAPGTSTEPSEGSAPGTSTEPSEGSAPGTSTEPSEGSAPGTSTEPSEGSAPGSPAGSPTSTE |
| | | EGTSTEPSEGSAPGTSESATPESGPGSEPATSGSETPGTSESATPESGPGSEPATSGSETPGT |
| | | SESATPESGPGTSTEPSEGSAPGTSESATPESGPGSPAGSPTSTEEGSPAGSPTSTEEGSPAG |
| | | SPTSTEEGTSESATPESGPGTSTEPSEGSAPGTSESATPESGPGSEPATSGSETPGTSESATPE |
| | | SGPGSEPATSGSETPGTSESATPESGPGTSTEPSEGSAPGSPAGSPTSTEEGTSESATPESGP |
| | | GSEPATSGSETPGTSESATPESGPGSPAGSPTSTEEGSPAGSPTSTEEGTSTEPSEGSAPGTS |
| | | ESATPESGPGTSESATPESGPGTSESATPESGPGSEPATSGSETPGSEPATSGSETPGSPAGS |
| | | PTSTEEGTSTEPSEGSAPGTSTEPSEGSAPGSEPATSGSETPGTSESATPESGPGTSTEPSEGS |
| | | APSASR |
| 720 | AE864_R1 | SAGSPGSPAGSPTSTEEGTSESATPESGPGTSTEPSEGSAPGSPAGSPTSTEEGTSTEPSEGS |
| | | APGTSTEPSEGSAPGTSESATPESGPGSEPATSGSETPGSEPATSGSETPGSPAGSPTSTEEG |
| | | TSESATPESGPGTSTEPSEGSAPGTSTEPSEGSAPGSPAGSPTSTEEGTSTEPSEGSAPGTSTE |
| | | PSEGSAPGTSESATPESGPGTSTEPSEGSAPGTSESATPESGPGSEPATSGSETPGTSTEPSEG |
| | | SAPGTSTEPSEGSAPGTSESATPESGPGTSESATPESGPGSPAGSPTSTEEGTSESATPESGP |
| | | GSEPATSGSETPGTSESATPESGPGTSTEPSEGSAPGTSTEPSEGSAPGTSTEPSEGSAPGTS |
| | | TEPSEGSAPGTSTEPSEGSAPGTSTEPSEGSAPGSPAGSPTSTEEGTSTEPSEGSAPGTSESA |
| | | TPESGPGSEPATSGSETPGTSESATPESGPGSEPATSGSETPGTSESATPESGPGTSTEPSEGS |
| | | APGTSESATPESGPGSPAGSPTSTEEGSPAGSPTSTEEGSPAGSPTSTEEGTSESATPESGPG |
| | | TSTEPSEGSAPGTSESATPESGPGSEPATSGSETPGTSESATPESGPGSEPATSGSETPGTSES |
| | | ATPESGPGTSTEPSEGSAPGSPAGSPTSTEEGTSESATPESGPGSEPATSGSETPGTSESATP |
| | | ESGPGSPAGSPTSTEEGSPAGSPTSTEEGTSTEPSEGSAPGTSESATPESGPGTSESATPESGP |
| | | GTSESATPESGPGSEPATSGSETPGSEPATSGSETPGSPAGSPTSTEEGTSTEPSEGSAPGTS |
| | | TEPSEGSAPGSEPATSGSETPGTSESATPESGPGTESASR |
| 721 | AE712 | PGSPAGSPTSTEEGTSESATPESGPGTSTEPSEGSAPGSPAGSPTSTEEGTSTEPSEGSAPGTS |
| | | TEPSEGSAPGTSESATPESGPGSEPATSGSETPGSEPATSGSETPGSPAGSPTSTEEGTSESA |
| | | TPESGPGTSTEPSEGSAPGTSTEPSEGSAPGSPAGSPTSTEEGTSTEPSEGSAPGTSTEPSEGS |
| | | APGTSESATPESGPGTSTEPSEGSAPGTSESATPESGPGSEPATSGSETPGTSTEPSEGSAPG |
| | | TSTEPSEGSAPGTSESATPESGPGTSESATPESGPGSPAGSPTSTEEGTSESATPESGPGSEPA |
| | | TSGSETPGTSESATPESGPGTSTEPSEGSAPGTSTEPSEGSAPGTSTEPSEGSAPGTSTEPSEG |
| | | SAPGTSTEPSEGSAPGTSTEPSEGSAPGSPAGSPTSTEEGTSTEPSEGSAPGTSESATPESGP |
| | | GSEPATSGSETPGTSESATPESGPGSEPATSGSETPGTSESATPESGPGTSTEPSEGSAPGTS |
| | | ESATPESGPGSPAGSPTSTEEGSPAGSPTSTEEGSPAGSPTSTEEGTSESATPESGPGTSTEPS |
| | | EGSAPGTSESATPESGPGSEPATSGSETPGTSESATPESGPGSEPATSGSETPGTSESATPES |
| | | GPGTSTEPSEGSAPGSPAGSPTSTEEGTSESATPESGPGSEPATSGSETPGTSESATPESGPG |
| | | SPAGSPTSTEAHHH |
| 722 | AE864_R2 | GSPGAGSPAGSPTSTEEGTSESATPESGPGTSTEPSEGSAPGSPAGSPTSTEEGTSTEPSEGS |
| | | APGTSTEPSEGSAPGTSESATPESGPGSEPATSGSETPGSEPATSGSETPGSPAGSPTSTEEG |
| | | TSESATPESGPGTSTEPSEGSAPGTSTEPSEGSAPGSPAGSPTSTEEGTSTEPSEGSAPGTSTE |
| | | PSEGSAPGTSESATPESGPGTSTEPSEGSAPGTSESATPESGPGSEPATSGSETPGTSTEPSEG |
| | | SAPGTSTEPSEGSAPGTSESATPESGPGTSESATPESGPGSPAGSPTSTEEGTSESATPESGP |
| | | GSEPATSGSETPGTSESATPESGPGTSTEPSEGSAPGTSTEPSEGSAPGTSTEPSEGSAPGTS |
| | | TEPSEGSAPGTSTEPSEGSAPGTSTEPSEGSAPGSPAGSPTSTEEGTSTEPSEGSAPGTSESA |
| | | TPESGPGSEPATSGSETPGTSESATPESGPGSEPATSGSETPGTSESATPESGPGTSTEPSEGS |
| | | APGTSESATPESGPGSPAGSPTSTEEGSPAGSPTSTEEGSPAGSPTSTEEGTSESATPESGPG |
| | | TSTEPSEGSAPGTSESATPESGPGSEPATSGSETPGTSESATPESGPGSEPATSGSETPGTSES |
| | | ATPESGPGTSTEPSEGSAPGSPAGSPTSTEEGTSESATPESGPGSEPATSGSETPGTSESATP |
| | | ESGPGSPAGSPTSTEEGSPAGSPTSTEEGTSTEPSEGSAPGTSESATPESGPGTSESATPESGP |
| | | GTSESATPESGPGSEPATSGSETPGSEPATSGSETPGSPAGSPTSTEEGTSTEPSEGSAPGTS |
| | | TEPSEGSAPGSEPATSGSETPGTSESATPESGPGTESASR |
| 723 | AE288_3 | SPAGSPTSTEEGTSESATPESGPGTSTEPSEGSAPGTSESATPESGPGSEPATSGSETPGTSES |
| | | ATPESGPGSEPATSGSETPGTSESATPESGPGTSTEPSEGSAPGSPAGSPTSTEEGTSESATP |
| | | ESGPGSEPATSGSETPGTSESATPESGPGSPAGSPTSTEEGSPAGSPTSTEEGTSTEPSEGSAP |
| | | GTSESATPESGPGTSESATPESGPGTSESATPESGPGSEPATSGSETPGSEPATSGSETPGSP |
| | | AGSPTSTEEGTSTEPSEGSAPGTSTEPSEGSAPG |
| 724 | AE284 | GTSESATPESGPGSEPATSGSETPGTSESATPESGPGSEPATSGSETPGTSESATPESGPGTS |
| | | TEPSEGSAPGSPAGSPTSTEEGTSESATPESGPGSEPATSGSETPGTSESATPESGPGSPAGS |
| | | PTSTEEGSPAGSPTSTEEGTSTEPSEGSAPGTSESATPESGPGTSESATPESGPGTSESATPES |
| | | GPGSEPATSGSETPGSEPATSGSETPGSPAGSPTSTEEGTSTEPSEGSAPGTSTEPSEGSAPG |
| | | SEPATSGSETPGTSESATPESGPGTSTEPSE |
| 725 | AE292 | SPAGSPTSTEEGTSESATPESGPGTSTEPSEGSAPGTSESATPESGPGSEPATSGSETPGTSES |
| | | ATPESGPGSEPATSGSETPGTSESATPESGPGTSTEPSEGSAPGSPAGSPTSTEEGTSESATP |
| | | ESGPGSEPATSGSETPGTSESATPESGPGSPAGSPTSTEEGSPAGSPTSTEEGTSTEPSEGSAP |
| | | GTSESATPESGPGTSESATPESGPGTSESATPESGPGSEPATSGSETPGSEPATSGSETPGSP |
| | | AGSPTSTEEGTSTEPSEGSAPGTSTEPSEGSAPGGSAP |
| 726 | AE864_2 | AGSPTSTEEGTSESATPESGPGTSTEPSEGSAPGSPAGSPTSTEEGTSTEPSEGSAPGTSTEPS |
| | | EGSAPGTSESATPESGPGSEPATSGSETPGSEPATSGSETPGSPAGSPTSTEEGTSESATPES |
| | | GPGTSTEPSEGSAPGTSTEPSEGSAPGSPAGSPTSTEEGTSTEPSEGSAPGTSTEPSEGSAPG |
| | | TSESATPESGPGTSTEPSEGSAPGTSESATPESGPGSEPATSGSETPGTSTEPSEGSAPGTSTE |
| | | PSEGSAPGTSESATPESGPGTSESATPESGPGSPAGSPTSTEEGTSESATPESGPGSEPATSG |
| | | SETPGTSESATPESGPGTSTEPSEGSAPGTSTEPSEGSAPGTSTEPSEGSAPGTSTEPSEGSAP |
| | | GTSTEPSEGSAPGTSTEPSEGSAPGSPAGSPTSTEEGTSTEPSEGSAPGTSESATPESGPGSEP |
| | | ATSGSETPGTSESATPESGPGSEPATSGSETPGTSESATPESGPGTSTEPSEGSAPGTSESAT |
| | | PESGPGSPAGSPTSTEEGSPAGSPTSTEEGSPAGSPTSTEEGTSESATPESGPGTSTEPSEGSA |
| | | PGTSESATPESGPGSEPATSGSETPGTSESATPESGPGSEPATSGSETPGTSESATPESGPGTS |
| | | TEPSEGSAPGSPAGSPTSTEEGTSESATPESGPGSEPATSGSETPGTSESATPESGPGSPAGS |
| | | PTSTEEGSPAGSPTSTEEGTSTEPSEGSAPGTSESATPESGPGTSESATPESGPGTSESATPES |
| | | GPGSEPATSGSETPGSEPATSGSETPGSPAGSPTSTEEGTSTEPSEGSAPGTSTEPSEGSAPG |
| | | SEPATSGSETPGTSESATPESGPGTSTEPSEGAAEPEA |
| 727 | AE867 | GSPAGSPTSTEEGTSESATPESGPGTSTEPSEGSAPGSPAGSPTSTEEGTSTEPSEGSAPGTS |
| | | TEPSEGSAPGTSESATPESGPGSEPATSGSETPGSEPATSGSETPGSPAGSPTSTEEGTSESA |
| | | TPESGPGTSTEPSEGSAPGTSTEPSEGSAPGSPAGSPTSTEEGTSTEPSEGSAPGTSTEPSEGS |
| | | APGTSESATPESGPGTSTEPSEGSAPGTSESATPESGPGSEPATSGSETPGTSTEPSEGSAPG |
| | | TSTEPSEGSAPGTSESATPESGPGTSESATPESGPGSPAGSPTSTEEGTSESATPESGPGSEPA |
| | | TSGSETPGTSESATPESGPGTSTEPSEGSAPGTSTEPSEGSAPGTSTEPSEGSAPGTSTEPSEG |
| | | SAPGTSTEPSEGSAPGTSTEPSEGSAPGSPAGSPTSTEEGTSTEPSEGSAPGTSESATPESGP |
| | | GSEPATSGSETPGTSESATPESGPGSEPATSGSETPGTSESATPESGPGTSTEPSEGSAPGTS |
| | | ESATPESGPGSPAGSPTSTEEGSPAGSPTSTEEGSPAGSPTSTEEGTSESATPESGPGTSTEPS |
| | | EGSAPGTSESATPESGPGSEPATSGSETPGTSESATPESGPGSEPATSGSETPGTSESATPES |
| | | GPGTSTEPSEGSAPGSPAGSPTSTEEGTSESATPESGPGSEPATSGSETPGTSESATPESGPG |
| | | SPAGSPTSTEEGSPAGSPTSTEEGTSTEPSEGSAPGTSESATPESGPGTSESATPESGPGTSES |
| | | ATPESGPGSEPATSGSETPGSEPATSGSETPGSPAGSPTSTEEGTSTEPSEGSAPGTSTEPSE |
| | | GSAPGSEPATSGSETPGTSESATPESGPGTSTEPSEGAAEPEA |
| 728 | AE867_2 | SPGSPAGSPTSTEEGTSESATPESGPGTSTEPSEGSAPGSPAGSPTSTEEGTSTEPSEGSAPGT |
| | | STEPSEGSAPGTSESATPESGPGSEPATSGSETPGSEPATSGSETPGSPAGSPTSTEEGTSESA |
| | | TPESGPGTSTEPSEGSAPGTSTEPSEGSAPGSPAGSPTSTEEGTSTEPSEGSAPGTSTEPSEGS |
| | | APGTSESATPESGPGTSTEPSEGSAPGTSESATPESGPGSEPATSGSETPGTSTEPSEGSAPG |
| | | TSTEPSEGSAPGTSESATPESGPGTSESATPESGPGSPAGSPTSTEEGTSESATPESGPGSEPA |
| | | TSGSETPGTSESATPESGPGTSTEPSEGSAPGTSTEPSEGSAPGTSTEPSEGSAPGTSTEPSEG |
| | | SAPGTSTEPSEGSAPGTSTEPSEGSAPGSPAGSPTSTEEGTSTEPSEGSAPGTSESATPESGP |
| | | GSEPATSGSETPGTSESATPESGPGSEPATSGSETPGTSESATPESGPGTSTEPSEGSAPGTS |
| | | ESATPESGPGSPAGSPTSTEEGSPAGSPTSTEEGSPAGSPTSTEEGTSESATPESGPGTSTEPS |
| | | EGSAPGTSESATPESGPGSEPATSGSETPGTSESATPESGPGSEPATSGSETPGTSESATPES |
| | | GPGTSTEPSEGSAPGSPAGSPTSTEEGTSESATPESGPGSEPATSGSETPGTSESATPESGPG |
| | | SPAGSPTSTEEGSPAGSPTSTEEGTSTEPSEGSAPGTSESATPESGPGTSESATPESGPGTSES |
| | | ATPESGPGSEPATSGSETPGSEPATSGSETPGSPAGSPTSTEEGTSTEPSEGSAPGTSTEPSE |
| | | GSAPGSEPATSGSETPGTSESATPESGPGTSTEPSEGSAPG |
| 729 | AE868 | PGSPAGSPTSTEEGTSESATPESGPGTSTEPSEGSAPGSPAGSPTSTEEGTSTEPSEGSAPGTS |
| | | TEPSEGSAPGTSESATPESGPGSEPATSGSETPGSEPATSGSETPGSPAGSPTSTEEGTSESA |
| | | TPESGPGTSTEPSEGSAPGTSTEPSEGSAPGSPAGSPTSTEEGTSTEPSEGSAPGTSTEPSEGS |
| | | APGTSESATPESGPGTSTEPSEGSAPGTSESATPESGPGSEPATSGSETPGTSTEPSEGSAPG |
| | | TSTEPSEGSAPGTSESATPESGPGTSESATPESGPGSPAGSPTSTEEGTSESATPESGPGSEPA |
| | | TSGSETPGTSESATPESGPGTSTEPSEGSAPGTSTEPSEGSAPGTSTEPSEGSAPGTSTEPSEG |
| | | SAPGTSTEPSEGSAPGTSTEPSEGSAPGSPAGSPTSTEEGTSTEPSEGSAPGTSESATPESGP |
| | | GSEPATSGSETPGTSESATPESGPGSEPATSGSETPGTSESATPESGPGTSTEPSEGSAPGTS |
| | | ESATPESGPGSPAGSPTSTEEGSPAGSPTSTEEGSPAGSPTSTEEGTSESATPESGPGTSTEPS |
| | | EGSAPGTSESATPESGPGSEPATSGSETPGTSESATPESGPGSEPATSGSETPGTSESATPES |
| | | GPGTSTEPSEGSAPGSPAGSPTSTEEGTSESATPESGPGSEPATSGSETPGTSESATPESGPG |
| | | SPAGSPTSTEEGSPAGSPTSTEEGTSTEPSEGSAPGTSESATPESGPGTSESATPESGPGTSES |
| | | ATPESGPGSEPATSGSETPGSEPATSGSETPGSPAGSPTSTEEGTSTEPSEGSAPGTSTEPSE |
| | | GSAPGSEPATSGSETPGTSESATPESGPGTSTEPSEGAAEPEA |
| 730 | AE144_7A | GSPAGSPTSTEEGTSESATPESGPGTSTEPSEGSAPGSPAGSPTSTEEGTSTEPSEGSAPGTS |
| | | TEPSEGSAPGTSESATPESGPGSEPATSGSETPGSEPATSGSETPGSPAGSPTSTEEGTSESA |
| | | TPESGPGTSTEPSEGSAP |
| 731 | AE292 | SPAGSPTSTEEGTSESATPESGPGTSTEPSEGSAPGTSESATPESGPGSEPATSGSETPGTSES |
| | | ATPESGPGSEPATSGSETPGTSESATPESGPGTSTEPSEGSAPGSPAGSPTSTEEGTSESATP |
| | | ESGPGSEPATSGSETPGTSESATPESGPGSPAGSPTSTEEGSPAGSPTSTEEGTSTEPSEGSAP |
| | | GTSESATPESGPGTSESATPESGPGTSESATPESGPGSEPATSGSETPGSEPATSGSETPGSP |
| | | AGSPTSTEEGTSTEPSEGSAPGTSTEPSEGSAPGGSAP |
| 732 | AE293 | PGSPAGSPTSTEEGTSESATPESGPGTSTEPSEGSAPGSPAGSPTSTEEGTSTEPSEGSAPGTS |
| | | TEPSEGSAPGTSESATPESGPGSEPATSGSETPGSEPATSGSETPGSPAGSPTSTEEGTSESA |
| | | TPESGPGTSTEPSEGSAPGTSTEPSEGSAPGSPAGSPTSTEEGTSTEPSEGSAPGTSTEPSEGS |
| | | APGTSESATPESGPGTSTEPSEGSAPGTSESATPESGPGSEPATSGSETPGTSTEPSEGSAPG |
| | | TSTEPSEGSAPGTSESATPESGPGTSESATPESGPGSPAGSPTSTEEGTSESATPESGPGSEPA |
| | | TSGSETPGTSESATPESGPGTSTEPSEGSAPGTSTEPSEGSAPGTSTEPSEGSAPGTSTEPSEG |
| | | SAPGTSTEPSEGSAPGTSTEPSEGSAPGSPAGSPTSTEEGTSTEPSEGSAPGTSESATPESGP |
| | | GSEPATSGSETPGTSESATPESGPGSEPATSGSETPGTSESATPESGPGTSTEPSEGSAPGTS |
| | | ESATPESGPGSPAGSPTSTEEGSPAGSPTSTEEGSPAGSPTSTEEGTSESATPESGPGTSTEPS |
| | | EGSAPGAAEPEA |
| 733 | AE300 | PGSPAGSPTSTEEGTSESATPESGPGTSTEPSEGSAPGSPAGSPTSTEEGTSTEPSEGSAPGTS |
| | | TEPSEGSAPGTSESATPESGPGSEPATSGSETPGSEPATSGSETPGSPAGSPTSTEEGTSESA |
| | | TPESGPGTSTEPSEGSAPGTSTEPSEGSAPGSPAGSPTSTEEGTSTEPSEGSAPGTSTEPSEGS |
| | | APGTSESATPESGPGTSTEPSEGSAPGTSESATPESGPGSEPATSGSETPGTSTEPSEGSAPG |
| | | TSTEPSEGSAPGTSESATPESGPGTSESATPESGPGSPAGAAEPEA |
| 734 | AE584 | PGSPAGSPTSTEEGTSESATPESGPGTSTEPSEGSAPGSPAGSPTSTEEGTSTEPSEGSAPGTS |
| | | TEPSEGSAPGTSESATPESGPGSEPATSGSETPGSEPATSGSETPGSPAGSPTSTEEGTSESA |
| | | TPESGPGTSTEPSEGSAPGTSTEPSEGSAPGSPAGSPTSTEEGTSTEPSEGSAPGTSTEPSEGS |
| | | APGTSESATPESGPGTSTEPSEGSAPGTSESATPESGPGSEPATSGSETPGTSTEPSEGSAPG |
| | | TSTEPSEGSAPGTSESATPESGPGTSESATPESGPGSPAGSPTSTEEGTSESATPESGPGSEPA |
| | | TSGSETPGTSESATPESGPGTSTEPSEGSAPGTSTEPSEGSAPGTSTEPSEGSAPGTSTEPSEG |
| | | SAPGTSTEPSEGSAPGTSTEPSEGSAPGSPAGSPTSTEEGTSTEPSEGSAPGTSESATPESGP |
| | | GSEPATSGSETPGTSESATPESGPGSEPATSGSETPGTSESATPESGPGTSTEPSEGSAPGTS |
| | | ESATPESGPGSPAGSPTSTEEGSPAGSPTSTEEGSPAGSPTSTEEGTSESATPESGPGTSTEPS |
| | | EGSAPGAAEPEA |

[0108] In some embodiments, for constructing the sequence of a barcoded XTEN polypeptide, amino acid mutations are performed on XTEN polypeptides of intermediate lengths to those of Table 3b, as well as XTEN polypeptides of longer lengths than those of Table 3b, such as those in which one or more 12-mer motifs of Table 1 are added to the N- or C-terminus of a general-purpose XTEN of Table 3b.

[0109] Additional examples of general-purpose XTEN polypeptide amino acid sequences that can be used according to the present disclosure are disclosed in U.S. Patent Publication Nos. 2010/0239554 A1, 2010/0323956 A1, 2011/0046060 A1, 2011/0046061 A1, 2011/0077199 A1, or 2011/0172146 A1, or International Patent Publication Nos. WO 2010091122 A1, WO 2010144502 A2, WO 2010144508 A1, WO 2011028228 A1, WO 2011028229 A1, WO 2011028344 A2, WO 2014/011819 A2, or WO 2015/023891, the disclosures of which are each expressly incorporated by reference herein.

[0110] In some embodiments, a barcoded XTEN polypeptide fused within a polypeptide chain adjacent to the N-terminus of the polypeptide chain (“N-terminal XTEN”) can be attached to a His tag of comprising a plurality of poly(His) residues, including six to eight His residues at the N-terminus to facilitate the purification of the fusion polypeptide. In some embodiments, a barcoded XTEN polypeptide fused within a polypeptide chain at the C-terminus of the polypeptide chain (“C-terminal XTEN polypeptide”) can be comprise or be attached to the sequence EPEA at the C-terminus to facilitate the purification of the fusion polypeptide. In some embodiment, the fusion polypeptide comprises both an N-terminal barcoded XTEN polypeptide and a C-terminal barcoded XTEN polypeptide, wherein the N-terminal barcoded XTEN is attached to a His tag of comprising a plurality of poly(His) residues, including six to eight His residues at the N-terminus; and wherein the C-terminal barcoded XTEN polypeptide is attached to the sequence EPEA at the C-terminus, thereby facilitating purification of the fusion polypeptide, for example, to at least 90%, 91%, 92%, 93%, 94%, 95%, 96%, 97%, 98%, or at least 99% purity by chromatography methods known in the art, including but not limited to IMAC chromatography, C-tagXL affinity matrix, and other such methods, including but not limited to those described in the EXAMPLES section below.

### Protease Digestion

[0111] A barcode fragment, as described above or anywhere else herein, can be cleavably fused within the XTEN polypeptide and releasable (configured to be released) from the XTEN polypeptide upon digestion of the polypeptide by a protease. In some embodiments, the protease is a Glu-C protease. In some embodiments, the protease cleaves on the C-terminal side of glutamic acid residues that are not followed by proline. One of ordinary skill in the art will understand that a barcoded XTEN polypeptide (an XTEN polypeptide that contains barcode fragment(s) therewithin) is designed to achieve high efficiency, precision and accuracy of the protease digestion. For example, one of ordinary skill in the art will understand that adjacent Glu-Glu (EE) residues in an XTEN sequence can result in varying cleavage patterns upon Glu-C digestion. Accordingly, when Glu-C protease is used for barcode release, the barcoded XTEN polypeptide or the barcode fragment(s) can be without any Glu-Glu (EE) sequence. One of ordinary skill in the art will also understand that a di-peptide Glu-Pro (EP) sequence, if present in the fusion polypeptide, can be incapable of cleavage by Glu-C protease during the barcode release process.

### Structural Configuration of BPXTEN

[0112] In some embodiments, a BPXTEN fusion protein comprises a single BP polypeptide and a single XTEN polypeptide. Such BPXTEN proteins can have at least the following permutations of configurations, each listed in an N- to C-terminus orientation: BP-XTEN; XTEN-BP; BP-S-XTEN; and XTEN-S-BP, wherein “S” is a spacer sequence as set forth below.

[0113] In some embodiments, the BPXTEN protein comprises a C-terminal XTEN polypeptide and, optionally, a spacer sequence (S) between the XTEN polypeptide and the BP polypeptide. Such BPXTEN protein can be represented by Formula I (depicted N- to C-terminus):

[chemical structure]

wherein BP is a biologically active protein as described hereinbelow; S is a spacer sequence having between 1 to about 50 amino acid residues that can optionally include a BP release segment (as described more fully hereinbelow); x is either 0 or 1; and XTEN can be any XTEN polypeptide described herein.

[0114] In some embodiments, the BPXTEN protein comprises an N-terminal XTEN polypeptide and, optionally, a spacer sequence (S) between the XTEN polypeptide and the BP protein. Such BPXTEN proteins can be represented by Formula II (depicted N- to C-terminus):

[chemical structure]

wherein BP is a biologically active protein as described hereinbelow; S is a spacer sequence having between 1 to about 50 amino acid residues that can optionally include a BP release segment (as described more fully hereinbelow); x is either 0 or 1; and XTEN can be any XTEN polypeptide as described herein.

[0115] In some embodiment, the BPXTEN protein comprises both an N-terminal XTEN polypeptide and a C-terminal XTEN polypeptide. Such BPXTEN proteins (e.g., the XPATs in FIGS. 1-2) can be represented by Formula III:

[chemical structure]

wherein BP is a biologically active protein as described hereinbelow; S is a spacer sequence having between 1 to about 50 amino acid residues that can optionally include a BP release segment (as described more fully hereinbelow); y is either 0 or 1; z is either 0 or 1; and XTEN can be any XTEN polypeptide as described herein.

### Biologically Active Polypeptide

[0116] A biologically active protein (BP) that can be fused to one or more XTEN polypeptides (as described herein), particularly those disclosed hereinbelow, comprising sequences identified herein by Tables 4a-4 h and Tables 6a-6f, together with their corresponding nucleic acid and amino acid sequences, are well known in the art. Descriptions and sequences of these BP are available in public databases such as Chemical Abstracts Services Databases (e.g., the CAS Registry), GenBank, The Universal Protein Resource (UniProt) and subscription provided databases such as GenSeq (e.g., Derwent). Polynucleotide sequences encoding BPs can be wildtype polynucleotide sequences encoding a native BP (e.g., either full length or mature), or in some instances the sequence can be a variant of a wildtype polynucleotide sequence (e.g., a polynucleotide which encodes the wildtype, biologically active protein), wherein the nucleotide sequence of the polynucleotide has been optimized, for example, for expression in a particular species; or a polynucleotide encoding a variant of the wildtype protein, such as a site-directed mutant or an allelic variant. It is well within the ability of the skilled artisan to use a wildtype or consensus cDNA sequence or a codon-optimized variant of a BP to create BPXTEN constructs contemplated by the invention using methods known in the art and/or in conjunction with the guidance and methods provided herein.

[0117] BP for inclusion in BPXTEN proteins disclosed herein (for example, a fusion polypeptide comprising at least one BP and at least one XTEN polypeptide) can include any protein of biologic, therapeutic, prophylactic, or diagnostic interest or function, or that is useful for mediating a biological activity or preventing or ameliorating a disease, disorder or conditions when administered to a human or animal. Particularly advantageous are BP for which an increase in a pharmacokinetic parameter, increased solubility, increased stability, masking of activity, or some other enhanced pharmaceutical property is sought, or those BP for which increasing the terminal half-life would improve efficacy, safety, or result in reduce dosing frequency and/or improve patient compliance. Thus, BPXTEN fusion protein compositions can be prepared with various objectives in mind, including improving therapeutic efficacy of the bioactive compound by, for example, increasing in vivo exposure or the length of time that the BPXTEN remains within the therapeutic window when administered to a human or animal compared to a BP not linked to an XTEN polypeptide.

[0118] A BP can be a native, full-length protein or can be a fragment or a sequence variant of a biologically active protein that retains at least a portion of the biological activity of the native protein.

[0119] In one embodiment, the BP incorporated into the human or animal compositions can be a recombinant polypeptide with a sequence corresponding to a protein found in nature. In another embodiment, the BP can be sequence variants, fragments, homologs, and mimetics of a natural sequence that retain at least a portion of the biological activity of the native BP. In non-limiting examples, a BP can be a sequence that exhibits at least about 80% sequence identity, or alternatively 81%, 82%, 83%, 84%, 85%, 86%, 87%, 88%, 89%, 90%, 91%, 92%, 93%, 94%, 95%, 96%, 97%, 98%, 99%, or 100% sequence identity to a protein sequence selected from Tables 4a-4h. In further non-limiting examples, a BP can be a bispecific sequence comprising a first binding domain and a second binding domain, wherein the first binding domain, having specific binding affinity to a tumor-specific marker or an antigen of a target cell, exhibits at least about 80% sequence identity, or alternatively 81%, 82%, 83%, 84%, 85%, 86%, 87%, 88%, 89%, 90%, 91%, 92%, 93%, 94%, 95%, 96%, 97%, 98%, 99%, or 100% sequence identity to paired VL and VH sequences of an anti-CD3 antibody identified in Table 6f; and wherein the second binding domain, having specific binding affinity to an effector cell, exhibits at least about 80% sequence identity, or alternatively 81%, 82%, 83%, 84%, 85%, 86%, 87%, 88%, 89%, 90%, 91%, 92%, 93%, 94%, 95%, 96%, 97%, 98%, 99%, or 100% sequence identity to paired VL and VH sequences of an anti-target cell antibody identified in Table 6a. In one embodiment, a BPXTEN fusion protein can comprise a single BP protein linked to an XTEN polypeptide. In another embodiment, the BPXTEN protein can comprise a first BP and a second molecule of the same BP, resulting in a fusion protein comprising the two BP linked to one or more XTEN polypeptides (for example, two molecules of glucagon, or two molecules of hGH).

[0120] In general, BP exhibits a binding specificity to a given target (or a given number of targets) or another desired biological characteristic when used in vivo or when utilized in an in vitro assay. For example, the BP can be an agonist, a receptor, a ligand, an antagonist, an enzyme, an antibody (e.g., mono- or bi-specific), or a hormone. Of particular interest are BP used or known to be useful for a disease or disorder wherein the native BP have a relatively short terminal half-life and for which an enhancement of a pharmacokinetic parameter (which optionally could be released from the fusion protein by cleavage of a spacer sequence) would permit less frequent dosing or an enhanced pharmacologic effect. Also of interest are BP that have a narrow therapeutic window between the minimum effective dose or blood concentration (Cmin) and the maximum tolerated dose or blood concentration (Cmax). In such cases, the linking of the BP to a fusion protein comprising a select XTEN polypeptide sequence(s) can result in an improvement in these properties, making them more useful as therapeutic or preventive agents compared to BP not linked to one or more XTEN polypeptides.

### Glucose-Regulating Peptides

[0121] Endocrine and obesity-related diseases or disorders have reached epidemic proportions in most developed nations, and represent a substantial and increasing health care burden in most developed nations, which include a large variety of conditions affecting the organs, tissues, and circulatory system of the body. Of particular concern are endocrine and obesity-related diseases and disorders, chief amongst which is diabetes, one of the leading causes of death in the United States.

[0122] Most metabolic processes in glucose homeostasis and insulin response are regulated by multiple peptides and hormones, and many such peptides and hormones, as well as analogues thereof, have found utility in the treatment of metabolic diseases and disorders. Many of these peptides tend to be highly homologous to each other, even when they possess opposite biological functions. Glucose-increasing peptides are exemplified by the peptide hormone glucagon, while glucose-lowering peptides include exendin-4, glucagon-like peptide 1, and amylin. However, the use of therapeutic peptides and/or hormones, even when augmented by the use of small molecule drugs, has met with limited success in the management of such diseases and disorders. In particular, dose optimization is important for drugs and biologics used in the treatment of metabolic diseases, especially those with a narrow therapeutic window. Hormones in general, and peptides involved in glucose homeostasis often have a narrow therapeutic window. The narrow therapeutic window, coupled with the fact that such hormones and peptides typically have a short half-life, which necessitates frequent dosing in order to achieve clinical benefit, results in difficulties in the management of such patients. While chemical modifications to a therapeutic protein, such as pegylation, can modify its in vivo clearance rate and subsequent serum half-life, it requires additional manufacturing steps and results in a heterogeneous final product. In addition, unacceptable side effects from chronic administration have been reported. Alternatively, genetic modification by fusion of an Fc domain to the therapeutic protein or peptide increases the size of the therapeutic protein, reducing the rate of clearance through the kidney, and promotes recycling from lysosomes by the FcRn receptor. Unfortunately, the Fc domain does not fold efficiently during recombinant expression and tends to form insoluble precipitates known as inclusion bodies. These inclusion bodies must be solubilized and functional protein must be renatured; a time-consuming, inefficient, and expensive process.

[0123] Thus, one aspect of the present invention is the incorporation of peptides involved in glucose homeostasis, insulin resistance and obesity (collectively, “glucose regulating peptides”) in BPXTEN fusion proteins to create compositions with utility in the treatment of glucose, insulin, and obesity disorders, disease and related conditions. Suitable glucose-regulating peptides that can be linked to XTEN polypeptides disclosed herein to create BPXTEN proteins that include all biologically active polypeptides, inter alia, that increase glucose-dependent secretion of insulin by pancreatic beta-cells or potentiate the action of insulin. Glucose-regulating peptides can also include biologically active polypeptides that stimulate pro-insulin gene transcription in the pancreatic beta-cells. Furthermore, glucose-regulating peptides can also include biologically active polypeptides that slow down gastric emptying time and reduce food intake. Glucose-regulating peptides can also include biologically active polypeptides that inhibit glucagon release from the alpha cells of the Islets of Langerhans. Table 4a provides a nonlimiting list of sequences of glucose-regulating peptides that can be encompassed by BPXTEN fusion proteins of the invention. Glucose regulating peptides of the inventive BPXTEN compositions disclosed herein can be a peptide that exhibits at least about 80% sequence identity (e.g., 81%, 82%, 83%, 84%, 85%, 86%, 87%, 88%, 89%, 90%, 91%, 92%, 93%, 94%, 95%, 96%, 97%, 98%, 99%, or 100% sequence identity) to an amino acid sequence selected from Table 4a.

TABLE 4a
Glucose-Regulating Peptides

| Name of Protein | SEQ ID | |
|---|---|---|
| (Synonym) | NO | Amino Acid Sequence |
| Adrenomedullin | 1 | YRQSMNNFQGLRSFGCRFGTCTVQKLAHQIYQFTDKDKDNVAPRSKIS |
| (ADM) | | PQGY |
| Amylin, rat | 2 | KCNTATCATQRLANFLVRSSNNLGPVLPPTNVGSNTY |
| Amylin, human | 3 | [sequence omitted] |
| Calcitonin (hCT) | 4 | CGNLSTCMLGTYTQDFNKFHTFPQTAIGVGAP |
| Calcitonin, salmon | 5 | CSNLSTCVLGKLSQELHKLQTYPRTNTGSGTP |
| Calcitonin gene related | 6 | ACDTATCVTHRLAGLLSRSGGVVKNMVPTNVGSKAF |
| peptide (h-CGRP α) | | |
| Calcitonin gene related | 7 | ACNTATCVTHRLAGLLSRSGGMVKSNFVPTNVGSKAF |
| peptide (h-CGRP β) | | |
| cholecystokinin (CCK) | 8 | MNSGVCLCVLMAVLAAGALTQPVPPADPAGSGLQRAEEAPRRQLRVS |
| | | QRTDGESRAHLGALLARYIQQARKAPSGRMSIVKNLQNLDPSHRISDR |
| | | DYMGWMDFGRRSAEEYEYPS |
| CCK-33 | 9 | KAPSGRMSIVKNLQNLDPSHRISDRDYMGWMDF |
| CCK-8 | 10 | DYMGWMDF |
| Exendin-3 | 11 | HSDGTFTSDLSKQMEEEAVRLFIEWLKNGGPSSGAPPPS |
| Exendin-4 | 12 | HGEGTFTSDLSKQMEEEAVRLFIEWLKNGGPSSGAPPPS |
| FGF-19 | 13 | MRSGCVVVHVWILAGLWLAVAGRPLAFSDAGPHVHYGWGDPIRLRH |
| | | LYTSGPHGLSSCFLRIRADGVVDCARGQSAHSLLEIKAVALRTVAIKGV |
| | | HSVRYLCMGADGKMQGLLQYSEEDCAFEEEIRPDGYNVYRSEKHRLP |
| | | VSLSSAKQRQLYKNRGFLPLSHFLPMLPMVPEEPEDLRGHLESDMFSSP |
| | | LETDSMDPFGLVTGLEAVRSPSFEK |
| FGF-21 | 14 | MDSDETGFEHSGLWVSVLAGLLLGACQAHPIPDSSPLLQFGGQVRQRY |
| | | LYTDDAQQTEAHLEIREDGTVGGAADQSPESLLQLKALKPGVIQILGV |
| | | KTSRFLCQRPDGALYGSLHFDPEACSFRELLLEDGYNVYQSEAHGLPL |
| | | HLPGNKSPHRDPAPRGPARFLPLPGLPPALPEPPGILAPQPPDVGSSDPL |
| | | SMVGPSQGRSPSYAS |
| Gastrin | 15 | QLGPQGPPHLVADPSKKQGPWLEEEEEAYGWMDF |
| Gastrin-17 | 16 | DPSKKQGPWLEEEEEAYGWMDF |
| Gastric inhibitory | 17 | YAEGTFISDYSIAMDKIHQQDFVNWLLAQKGKKNDWKHNITQ |
| polypeptide (GIP) | | |
| Ghrelin | 18 | GSSFLSPEHQRVQQRKESKKPPAKLQPR |
| Glucagon | 19 | HSQGTFTSDYSKYLDSRRAQDFVQWLMNT |
| Glucagon-like peptide- | 20 | HDEFERHAEGTFTSDVSSTLEGQAALEFIAWLVKGRG |
| 1 (hGLP-1) (GLP-1; 1-37) | | |
| GLP-1 (7-36), human | 21 | HAEGTFTSDVSSYLEGQAALEFIAWLVKGR |
| GLP-1 (7-37), human | 22 | HAEGTFTSDVSSTLEGQAALEFIAWLVKGRG |
| GLP-1, frog | 23 | HAEGTYTNDVTEYLEEKAAKEFIEWLIKGKPKKIRYS |
| Glucagon-like peptide 2 | 24 | HADGSFSDEMNTILDNLAARDFINWLIETKITD |
| (GLP-2), human | | |
| GLP-2, frog | 25 | HAEGTFTNDMTNYLEEKAAKEFVGWLIKGRP-OH |
| IGF-1 | 26 | GPETLCGAELVDALQFVCGDRGFYFNKPTGYGSSSRRAPQTGIVDECC |
| | | FRSCDLRRLEMYCAPLKPAKSA |
| IGF-2 | 27 | AYRPSETLCGGELVDTLQFVCGDRGFYFSRPASRVSRRSRGIVEECCFR |
| | | SCDLALLETYCATPAKSE |
| INGAP peptide | 28 | EESQKKLPSSRITCPQGSVAYGSYCYSLILIPQTWSNAELSCQMHFSGH |
| (islet neogenesis- | | LAFLLSTGEITFVSSLVKNSLTAYQYIWIGLHDPSHGTLPNGSGWKWSS |
| associated protein) | | SNVLTFYNWERNPSIAADRGYCAVLSQKSGFQKWRDFNCENELPYICK |
| | | FKV |
| Intermedin (AFP-6) | 29 | TQAQLLRVGCVLGTCQVQNLSHRLWQLMGPAGRQDSAPVDPSSPHSY |
| Leptin, human | 30 | VPIQKVQDDTKTLIKTIVTRINDISHTQSVSSKQKVTGLDFIPGLHPILTL |
| | | SKMDQTLAVYQQILTSMPSRNVIQISNDLENLRDLLHVLAFSKSCHLP |
| | | WASGLETLDSLGGVLEASGYSTEVVALSRLQGSLQDMLWQLDLSPGC |
| Neuromedin (U-8) | 31 | YFLFRPRN |
| porcine | | |
| Neuromedin (U-9) | 32 | GYFLFRPRN |
| neuromedin (U25) | 33 | FRVDEEFQSPFASQSRGYFLFRPRN |
| human) | | |
| Neuromedin (U25) pig | 34 | FKVDEEFQGPIVSQNRRYFLFRPRN |
| Neuromedin S, human | 35 | ILQRGSGTAAVDFTKKDHTATWGRPFFLFRPRN |
| Neuromedin U, rat | 36 | YKVNEYQGPVAPSGGFFLFRPRN |
| oxyntomodulin (OXM) | 37 | HSQGTFTSDYSKYLDSRRAQDFVQWLMNTKRNRNNIA |
| Peptide YY (PYY) | 38 | YPIKPEAPGEDASPEELNRYYASLRHYLNLVTRQRY |
| Pramlintide | 39 | KCNTATCATNRLANFLVHSSNNFGPILPPTNVGSNTY-NH2 |
| Urocortin (Ucn-1) | 40 | DNPSLSIDLTFHLLRTLLELARTQSQRERAEQNRIIFDSV |
| Urocortin (Ucn-2) | 41 | IVLSLDVPIGLLQILLEQARARAAREQATTNARILARVGHC |
| Urocortin (Ucn-3) | 42 | FTLSLDVPTNIMNLLFNIAKAKNLRAQAAANAHLMAQI |

[0124] “Adrenomedullin” or “ADM” means the human adrenomedulin peptide hormone and species and sequence variants thereof having at least a portion of the biological activity of mature ADM. ADM is generated from a 185 amino acid preprohormone through consecutive enzymatic cleavage and amidation, resulting in a 52 amino acid bioactive peptide with a measured plasma half-life of 22 min. ADM-containing fusion proteins of the invention can find particular use in diabetes for stimulatory effects on insulin secretion from islet cells for glucose regulation or in human or animals with sustained hypotension. The complete genomic infrastructure for human AM has been reported (Ishimitsu et al., 1994, Biochem. Biophys. Res. Commun 203:631-639), and analogs of ADM peptides have been cloned, as described in U.S. Pat. No. 6,320,022.

[0125] “Amylin” means the human peptide hormone referred to as amylin, pramlintide, and species variations thereof, as described in U.S. Pat. No. 5,234,906, having at least a portion of the biological activity of mature amylin. Amylin is a 37-amino acid polypeptide hormone co-secreted with insulin by pancreatic beta cells in response to nutrient intake (Koda et al., 1992, Lancet 339:1179-1180), and has been reported to modulate several key pathways of carbohydrate metabolism, including incorporation of glucose into glycogen. Amylin-containing fusion proteins of the invention can complement the action of insulin, which regulates the rate of glucose disappearance from the circulation and its uptake by peripheral tissues. Amylin analogues have been cloned, as described in U.S. Pat. Nos. 5,686,411 and 7,271,238.

[0126] Amylin mimetics can be created that retain biologic activity. For example, pramlintide has the sequence KCNTATCATNRLANFLVHSSNNFGPILPPTNVGSNTY (SEQ ID NO: 43), wherein amino acids from the rat amylin sequence are substituted for amino acids in the human amylin sequence. In one embodiment, the invention contemplates fusion proteins comprising amylin mimetics of the sequence KCNTATCATX₁RLANFLVHSSNNFGX₂ILX₂X₂TNVGSNTY (SEQ ID NO: 44) wherein X₁ is independently N or Q and X₂ is independently S, P or G. In one embodiment, the amylin mimetic incorporated into a BPXTEN can have the sequence KCNTATCATNRLANFLVHSSNNFGGILGGTNVGSNTY (SEQ ID NO: 45). In another embodiment, wherein the amylin mimetic is used at the C-terminus of the BPXTEN, the mimetic can have the sequence KCNTATCATNRLANFLVHSSNNFGGILGGTNVGSNTY(NH₂) (SEQ ID NO: 46).

[0127] “Calcitonin” (CT) means the human calcitonin protein and species and sequence variants thereof, including salmon calcitonin (“sCT”), having at least a portion of the biological activity of mature CT. CT is a 32 amino acid peptide cleaved from a larger prohormone of the thyroid that appears to function in the nervous and vascular systems, but has also been reported to be a potent hormonal mediator of the satiety reflex. (Reviewed in Becker, JCEM, 89(4): 1512-1525 (2004) and Sexton, Current Medicinal Chemistry 6: 1067-1093 (1999)). Calcitonin-containing fusion proteins of the invention can find particular use for the treatment of osteoporosis and as a therapy for Paget's disease of bone. Synthetic calcitonin peptides have been created, as described in U.S. Pat. Nos. 5,175,146 and 5,364,840.

[0128] “Calcitonin gene related peptide” or “CGRP” means the human CGRP peptide and species and sequence variants thereof having at least a portion of the biological activity of mature CGRP, which is a member of the calcitonin family of peptides, which in humans exists in two forms, α-CGRP (a 37 amino acid peptide) and 3-CGRP. CGRP has 43-46% sequence identity with human amylin. CGRP-containing fusion proteins of the invention can find particular use in decreasing morbidity associated with diabetes, ameliorating hyperglycemia and insulin deficiency, inhibition of lymphocyte infiltration into the islets, and protection of beta cells against autoimmune destruction. Methods for making synthetic and recombinant CGRP are described in U.S. Pat. No. 5,374,618.

[0129] “Cholecystokinin” or “CCK” means the human CCK peptide and species and sequence variants thereof having at least a portion of the biological activity of mature CCK. CCK-58 is the mature sequence, while the CCK-33 amino acid sequence first identified in humans is the major circulating form of the peptide. The CCK family also includes an 8-amino acid in vivo C-terminal fragment (“CCK-8”), pentagastrin or CCK-5 being the C-terminal peptide CCK(29-33), and CCK-4 being the C-terminal tetrapeptide CCK(30-33). CCK is a peptide hormone of the gastrointestinal system responsible for stimulating the digestion of fat and protein. CCK-33 and CCK-8-containing fusion proteins of the invention can find particular use in reducing the increase in circulating glucose after meal ingestion and potentiating the increase in circulating insulin. Analogues of CCK-8 have been prepared, as described in U.S. Pat. No. 5,631,230.

[0130] “Exendin-3” means a glucose regulating peptide isolated from Heloderma horridum and sequence variants thereof having at least a portion of the biological activity of mature exendin-3. Exendin-3 amide is a specific exendin receptor antagonist from that mediates an increase in pancreatic cAMP, and release of insulin and amylase. Exendin-3-containing fusion proteins of the invention can find particular use in the treatment of diabetes and insulin resistance disorders. The sequence and methods for its assay are described in U.S. Pat. No. 5,424,286.

[0131] Exendin-4″ means a glucose regulating peptide found in the saliva of the Gila-monster Heloderma suspectum, as well as species and sequence variants thereof, and includes the native 39 amino acid sequence HGEGTFTSDLSKQMEEEAVRLFIEYLKNGGPSSGAPPPS (SEQ ID NO: 47) and homologous sequences and peptide mimetics, and variants thereof; natural sequences, such as from primates and non-natural having at least a portion of the biological activity of mature exendin-4. Exendin-4 is an incretin polypeptide hormone that decreases blood glucose, promotes insulin secretion, slows gastric emptying and improves satiety, providing a marked improvement in postprandial hyperglycemia. Table 4b shows the sequences from a wide variety of species, while Table 4c shows a list of synthetic GLP-1 analogs; all of which are contemplated for use in the BPXTEN proteins described herein.

[0132] Fibroblast growth factor 21, or “FGF-21” means the human protein encoded by the FGF-21 gene, or species and sequence variants thereof having at least a portion of the biological activity of mature FGF-21. FGF-21 stimulates glucose uptake in adipocytes but not in other cell types; the effect is additive to the activity of insulin. FGF-21-containing fusion proteins of the invention can find particular use in treatment of diabetes, including causing increased energy expenditure, fat utilization and lipid excretion. FGF-21 has been cloned, as disclosed in U.S. Pat. No. 6,716,626.

[0133] “Fibroblast growth factor 19,” or “FGF-19” means the human protein encoded by the FGF-19 gene, or species and sequence variants thereof having at least a portion of the biological activity of mature FGF-19. FGF-19 is a protein member of the fibroblast growth factor (FGF) family. FGF-19 increases liver expression of the leptin receptor, metabolic rate, stimulates glucose uptake in adipocytes, and leads to loss of weight in an obese mouse model (Fu et al., 2004, Endocrinology 145: 2504-2603) FGF-19-containing fusion proteins of the invention can find particular use in increasing metabolic rate and reversal of dietary and leptin-deficient diabetes. FGF-19 has been cloned and expressed, as described in US Patent Application No. 20020042367.

[0134] “Gastrin” means the human gastrin peptide, truncated versions, and species and sequence variants thereof having at least a portion of the biological activity of mature gastrin. Gastrin is found primarily in three forms: gastrin-34 (“big gastrin”); gastrin-17 (“little gastrin”); and gastrin-14 (“minigastrin”) and shares sequence homology with CCK. Gastrin-containing fusion proteins of the invention can find particular use in the treatment of obesity and diabetes for glucose regulation. Gastrin has been synthesized, as described in U.S. Pat. No. 5,843,446.

[0135] “Ghrelin” means a human hormone that induces satiation, or species and sequence variants thereof, including the native, processed 27 or 28 amino acid sequence and homologous sequences. Ghrelin levels increase before meals and decrease after meals, and can result in increased food intake and increase fat mass by an action exerted at the level of the hypothalamus. Ghrelin-containing fusion proteins of the invention can find particular use as agonists; e.g., to selectively stimulate motility of the GI tract in gastrointestinal motility disorder, to accelerate gastric emptying, or to stimulate the release of growth hormone. Ghrelin analogs with sequence substitutions or truncated variants, such as described in U.S. Pat. No. 7,385,026, can find particular use as fusion partners with XTEN polypeptides for use as antagonists for improved glucose homeostasis, treatment of insulin resistance and treatment of obesity. The isolation and characterization of ghrelin has been reported (Kojima et al., 1999, Nature. 402:656-660) and synthetic analogs have been prepared by peptide synthesis, as described in U.S. Pat. No. 6,967,237.

[0136] “Glucagon” means the human glucagon glucose regulating peptide, or species and sequence variants thereof, including the native 29 amino acid sequence and homologous sequences; natural, such as from primates, and non-natural sequence variants having at least a portion of the biological activity of mature glucagon. The term “glucagon” as used herein also includes peptide mimetics of glucagon. Glucagon-containing fusion proteins of the invention can find particular use in increasing blood glucose levels in individuals with extant hepatic glycogen stores and maintaining glucose homeostasis in diabetes. Glucagon has been cloned, as disclosed in U.S. Pat. No. 4,826,763.

[0137] “GLP-1” means human glucagon like peptide-1 and sequence variants thereof having at least a portion of the biological activity of mature GLP-1. The term “GLP-1” includes human GLP-1(1-37), GLP-1(7-37), and GLP-1(7-36)amide. GLP-1 stimulates insulin secretion, but only during periods of hyperglycemia. The safety of GLP-1 compared to insulin is enhanced by this property and by the observation that the amount of insulin secreted is proportional to the magnitude of the hyperglycemia. The biological half-life of GLP-1(7-37)OH is a mere 3 to 5 minutes (U.S. Pat. No. 5,118,666). GLP-1-containing fusion proteins of the invention can find particular use in the treatment of diabetes and insulin-resistance disorders for glucose regulation. GLP-1 has been cloned and derivatives prepared, as described in U.S. Pat. No. 5,118,666. Non-limited examples of GLP-1 sequences from a wide variety of species are shown in Table 4b, while Table 4c shows the sequences of a number of synthetic GLP-1 analogs; all of which are contemplated for use in the BPXTEN compositions described herein.

TABLE 4b
Representative Naturally-Occurring GLP-1 Homologs as BP Candidates

| Gene Name | SEQ ID NO | Amino Acid Sequence |
|---|---|---|
| GLP-1 {frog} | 48 | HAEGTYTNDVTEYLEEKAAKEFIEWLIKGKPKKIRYS |
| GLP-1a {Xenopus laevis} | 49 | HAEGTFTSDVTQQLDEKAAKEFIDWLINGGPSKEIIS |
| GLP-1b {Xenopus laevis} | 50 | HAEGTYTNDVTEYLEEKAAKEFIIEWLIKGKPK |
| GLP-1c {Xenopus laevis} | 51 | HAEGTFTNDMTNYLEEKAAKEFVGWLIKGRPK |
| Gastric Inhibitory | 52 | HAEGTFISDYSIAMDKIRQQDFVNWLL |
| Polypeptide {Mus musculus} | | |
| Glucose-dependent | 53 | HAEGTFISDYSIAMDKIRQQDFVNWLL |
| insulinotropic polypeptide | | |
| {Equus caballus} | | |
| Glucagon-like peptide | 54 | HADGTFTNDMTSYLDAKAARDFVSWLARSDKS |
| {Petromyzon marinus} | | |
| Glucagon-like peptide | 55 | HAEGTYTSDVSSYLQDQAAKEFVSWLKTGR |
| {Anguilla rostrata} | | |
| Glucagon-like peptide | 56 | HAEGTYTSDVSSYLQDQAAKEFVSWLKTGR |
| {Anguilla anguilla} | | |
| Glucagon-like peptide | 57 | HADGIYTSDVASLTDYLKSKRFVESLSNYNKRQNDRRM |
| {Hydrolagus colliei} | | |
| Glucagon-like peptide | 58 | YADAPYISDVYSYLQDQVAKKWLKSGQDRRE |
| {Amia calva} | | |
| GLUC_ICTPU/38-65 | 59 | HADGTYTSDVSSYLQEQAAKDFITWLKS |
| GLUCL_ANGRO/1-28 | 60 | HAEGTYTSDVSSYLQDQAAKEFVSWLKT |
| GLUC_BOVIN/98-125 | 61 | HAEGTFTSDVSSYLEGQAAKEFIAWLVK |
| GLUC1_LOPAM/91-118 | 62 | HADGTFTSDVSSYLKDQAIKDFVDRLKA |
| GLUCL_HYDCO/1-28 | 63 | HADGIYTSDVASLTDYLKSKRFVESLSN |
| GLUC_CAVPO/53-80 | 64 | HSQGTFTSDYSKYLDSRRAQQFLKWLLN |
| GLUC_CHIBR/1-28 | 65 | HSQGTFTSDYSKHLDSRYAQEFVQWLMN |
| GLUC1_LOPAM/53-80 | 66 | HSEGTFSNDYSKYLEDRKAQEFVRWLMN |
| GLUC_HYDCO/1-28 | 67 | HTDGIFSSDYSKYLDNRRTKDFVQWLLS |
| GLUC_CALMI/1-28 | 68 | HSEGTFSSDYSKYLDSRRAKDFVQWLMS |
| GIP_BOVIN/1-28 | 69 | YAEGTFISDYSIAMDKIRQQDFVNWLLA |
| VIP_MELGA/89-116 | 70 | HADGIFTTVYSHLLAKLAVKRYLHSLIR |
| PACA_CHICK/131-158 | 71 | HIDGIFTDSYSRYRKQMAVKKYLAAVLG |
| VIP_CAVPO/45-72 | 72 | HSDALFTDTYTRLRKQMAMKKYLNSVLN |
| VIP_DIDMA/1-28 | 73 | HSDAVFTDSYTRLLKQMAMRKYLDSILN |
| EXE1_HELSU/1-28 | 74 | HSDATFTAEYSKLLAKLALQKYLESILG |
| SLIB_CAPHI/1-28 | 75 | YADAIFTNSYRKVLGQLSARKLLQDIMN |
| SLIB_RAT/31-58 | 76 | HADAIFTSSYRRILGQLYARKLLHEIMN |
| SLIB_MOUSE/31-58 | 77 | HVDAIFTTNYRKLLSQLYARKVIQDIMN |
| PACA_HUMAN/83-110 | 78 | VAHGILNEAYRKVLDQLSAGKHLQSLVA |
| PACA_SHEEP/83-110 | 79 | VAHGILDKAYRKVLDQLSARRYLQTLMA |
| PACA_ONCNE/82-109 | 80 | HADGMFNKAYRKALGOLSARKYLHSLMA |
| GLUC_BOVIN/146-173 | 81 | HADGSFSDEMNTVLDSLATRDFINWLLQ |
| SECR_CANFA/1-27 | 82 | HSDGTFTSELSRLRESARLQRLLOGLV |
| SECR_CHICK/1-27 | 83 | HSDGLFTSEYSKMRGNAQVQKFIQNLM |
| EXE3_HELHO/48-75 | 84 | HSDGTFTSDLSKQMEEEAVRLFIEWLKN |

TABLE 4c
Representative GLP-1 Synthetic Analogs

| SEQ ID NO | Amino Acid Sequence |
|---|---|
| 85 | HAEGTFTSDVSSYLEGQAAREFIAWLVKGRG |
| 86 | HAEGTFTSDVSSYLEGQAAKEFIAWLVRGRG |
| 87 | HAEGTFTSDVSSYLEGQAAKEFIAWLVKGKG |
| 88 | HAEGTFTSDVSSYLEGQAAREFIAWLVRGKG |
| 89 | HAEGTFTSDVSSYLEGQAAREFIAWLVRGKGR |
| 90 | HAEGTFTSDVSSYLEGQAAREFIAWLVRGRGRK |
| 91 | HAEGTFTSDVSSYLEGQAAREFIAWLVRGRGRRK |
| 92 | HAEGTFTSDVSSYLEGQAAREFIAWLVKGKG |
| 93 | HAEGTFTSDVSSYLEGQAAKEFIAWLVRGKG |
| 94 | HAEGTFTSDVSSYLEGQAAREFIAWLVKGRGRK |
| 95 | HAEGTFTSDVSSYLEGQAAKEFIAWLVRGRGRRK |
| 96 | HAEGTFTSDVSSYLEGQAAREFIAWLVRGKGRK |
| 97 | HAEGTFTSDVSSYLEGQAAREFIAWLVRGKGRRK |
| 98 | HGEGTFTSDVSSYLEGQAAREFIAWLVKGRG |
| 99 | HGEGTFTSDVSSYLEGQAAKEFIAWLVRGRG |
| 100 | HGEGTFTSDVSSYLEGQAAKEFIAWLVKGKG |
| 101 | HGEGTFTSDVSSYLEGQAAREFIAWLVRGKG |
| 102 | HGEGTFTSDVSSYLEGQAAREFIAWLVRGRGRK |
| 103 | HGEGTFTSDVSSYLEGQAAREFIAWLVRGRGRRK |
| 104 | HGEGTFTSDVSSYLEGQAAREFIAWLVKGKG |
| 105 | HGEGTFTSDVSSYLEGQAAKEFIAWLVRGKG |
| 106 | HGEGTFTSDVSSYLEGQAAREFIAWLVKGRGRK |
| 107 | HGEGTFTSDVSSYLEGQAAKEFIAWLVRGRGRRK |
| 108 | HGEGTFTSDVSSYLEGQAAREFIAWLVRGKGRK |
| 109 | HGEGTFTSDVSSYLEGQAAREFIAWLVRGKGRRK |
| 110 | HAEGTFTSDVSSYLEGQAAREFIAWLVRGRGK |
| 111 | HAEGTFTSDVSSYLEGQAAREFIAWLVRGRGRK |
| 112 | HAEGTFTSDVSSYLEGQAAREFIAWLVRGRGRRK |
| 113 | HAEGTFTSDVSSYLEGQAAREFIAWLVRGRGRREK |
| 114 | HAEGTFTSDVSSYLEGQAAREFIAWLVRGRGRREFK |
| 115 | HAEGTFTSDVSSYLEGQAAREFIAWLVRGRGRREFPK |
| 116 | HAEGTFTSDVSSYLEGQAAREFIAWLVRGRGRREFPEK |
| 117 | HAEGTFTSDVSSYLEGQAAREFIAWLVRGRGRREFPEEK |
| 118 | HDEFERHAEGTFTSDVSSYLEGQAAREFIAWLVRGRGK |
| 119 | HDEFERHAEGTFTSDVSSYLEGQAAREFIAWLVRGRGRK |
| 120 | HDEFERHAEGTFTSDVSSYLEGQAAREFIAWLVRGRGRRK |
| 121 | HDEFERHAEGTFTSDVSSYLEGQAAREFIAWLVRGRGRREK |
| 122 | HDEFERHAEGTFTSDVSSYLEGQAAREFIAWLVRGRGRREFK |
| 123 | HDEFERHAEGTFTSDVSSYLEGQAAREFIAWLVRGRGRREFPK |
| 124 | HDEFERHAEGTFTSDVSSYLEGQAAREFIAWLVRGRGRREFPEK |
| 125 | HDEFERHAEGTFTSDVSSYLEGQAAREFIAWLVRGRGRREFPEEK |
| 126 | DEFERHAEGTFTSDVSSYLEGQAAREFIAWLVRGRGRK |
| 127 | DEFERHAEGTFTSDVSSYLEGQAAREFIAWLVRGRGRRK |
| 128 | DEFERHAEGTFTSDVSSYLEGQAAREFIAWLVRGRGRREK |
| 129 | DEFERHAEGTFTSDVSSYLEGQAAREFIAWLVRGRGRREFK |
| 130 | DEFERHAEGTFTSDVSSYLEGQAAREFIAWLVRGRGRREFPK |
| 131 | DEFERHAEGTFTSDVSSYLEGQAAREFIAWLVRGRGRREFPEK |
| 132 | DEFERHAEGTFTSDVSSYLEGQAAREFIAWLVRGRGRREFPEEK |
| 133 | EFERHAEGTFTSDVSSYLEGQAAREFIAWLVRGRGK |
| 134 | EFERHAEGTFTSDVSSYLEGQAAREFIAWLVRGRGRK |
| 135 | EFERHAEGTFTSDVSSYLEGQAAREFIAWLVRGRGRRK |
| 136 | EFERHAEGTFTSDVSSYLEGQAAREFIAWLVRGRGRREK |
| 137 | EFERHAEGTFTSDVSSYLEGQAAREFIAWLVRGRGRREFK |
| 138 | EFERHAEGTFTSDVSSYLEGQAAREFIAWLVRGRGRREFPK |
| 139 | EFERHAEGTFTSDVSSYLEGQAAREFIAWLVRGRGRREFPEK |
| 140 | EFERHAEGTFTSDVSSYLEGQAAREFIAWLVRGRGRREFPEEK |
| 141 | FERHAEGTFTSDVSSYLEGQAAREFIAWLVRGRGK |
| 142 | FERHAEGTFTSDVSSYLEGQAAREFIAWLVRGRGRK |
| 143 | FERHAEGTFTSDVSSYLEGQAAREFIAWLVRGRGRRK |
| 144 | FERHAEGTFTSDVSSYLEGQAAREFIAWLVRGRGRREK |
| 145 | FERHAEGTFTSDVSSYLEGQAAREFIAWLVRGRGRREFK |
| 146 | FERHAEGTFTSDVSSYLEGQAAREFIAWLVRGRGRREFPK |
| 147 | FERHAEGTFTSDVSSYLEGQAAREFIAWLVRGRGRREFPEK |
| 148 | FERHAEGTFTSDVSSYLEGQAAREFIAWLVRGRGRREFPEEK |
| 149 | ERHAEGTFTSDVSSYLEGQAAREFIAWLVRGRGK |
| 150 | ERHAEGTFTSDVSSYLEGQAAREFIAWLVRGRGRK |
| 151 | ERHAEGTFTSDVSSYLEGQAAREFIAWLVRGRGRRK |
| 152 | ERHAEGTFTSDVSSYLEGQAAREFIAWLVRGRGRREK |
| 153 | ERHAEGTFTSDVSSYLEGQAAREFIAWLVRGRGRREFK |
| 154 | ERHAEGTFTSDVSSYLEGQAAREFIAWLVRGRGRREFPK |
| 155 | ERHAEGTFTSDVSSYLEGQAAREFIAWLVRGRGRREFPEK |
| 156 | ERHAEGTFTSDVSSYLEGQAAREFIAWLVRGRGRREFPEEK |
| 157 | RHAEGTFTSDVSSYLEGQAAREFIAWLVRGRGK |
| 158 | RHAEGTFTSDVSSYLEGQAAREFIAWLVRGRGRK |
| 159 | RHAEGTFTSDVSSYLEGQAAREFIAWLVRGRGRRK |
| 160 | RHAEGTFTSDVSSYLEGQAAREFIAWLVRGRGRREK |
| 16 | RHAEGTFTSDVSSYLEGQAAREFIAWLVRGRGRREFK |
| 162 | RHAEGTFTSDVSSYLEGQAAREFIAWLVRGRGRREFPK |
| 163 | RHAEGTFTSDVSSYLEGQAAREFIAWLVRGRGRREFPEK |
| 164 | RHAEGTFTSDVSSYLEGQAAREFIAWLVRGRGRREFPEEK |
| 165 | HDEFERHAEGTFTSDVSSYLEGQAAREFIAWLVKGRGK |
| 166 | HDEFERHAEGTFTSDVSSYLEGQAAKEFIAWLVRGRGK |
| 167 | HDEFERHAEGTFTSDVSSYLEGQAAREFIAWLVRGKGK |
| 168 | HAEGTFTSDVSSYLEGQAAREFIAWLVKGRGK |
| 169 | HAEGTFTSDVSSYLEGQAAKEFIAWLVRGRGK |
| 170 | HAEGTFTSDVSSYLEGQAAREFIAWLVRGKGK |
| 171 | HAEGTFTSDVSSYLEGQAAREFIAWLVRGRGK |
| 172 | HDEFERHAEGTFTSDVSSYLEGQAAREFIAWLVKGRGRK |
| 173 | HDEFERHAEGTFTSDVSSYLEGQAAKEFIAWLVRGRGRK |
| 174 | HDEFERHAEGTFTSDVSSYLEGQAAREFIAWLVRGKGRK |
| 175 | HAEGTFTSDVSSYLEGQAAREFIAWLVKGRGRK |
| 176 | HAEGTFTSDVSSYLEGQAAKEFIAWLVRGRGRK |
| 177 | HAEGTFTSDVSSYLEGQAAREFIAWLVRGKGRK |
| 178 | HGEGTFTSDVSSYLEGQAAREFIAWLVKGRGK |
| 179 | HGEGTFTSDVSSYLEGQAAREFIAWLVRGKGK |

[0138] GLP native sequences can be described by several sequence motifs, which are presented below. Letters in brackets represent acceptable amino acids at each sequence position: {HVY} {IAGISTV} {DEHQ} {AG} {ILMPSTV} {FLY} {DINST} {ADEKNST} {ADENSTV} {LMVY} {ANRSTY} {EHIKNQRST}{AHILMQVY} {LMRT} {ADEGKQS} {ADEGKNQSY} {AEIKLMQR} {AKQRSVY} {{AILMQSTV} {GKQR} {DEKLQR} {FHLVWY} {ILV} {ADEGHIKNQRST} {ADEGNRSTW} {GILVW} {AIKLMQSV}{ADGIKNQRST} {GKRSY} (SEQ ID NO: 9399). In addition, synthetic analogs of GLP-1 can be useful as fusion partners to XTEN polypeptides to create BPXTEN protein with biological activity useful in treatment of glucose-related disorders.

[0139] “GLP-2” means human glucagon like peptide-2 and sequence variants thereof having at least a portion of the biological activity of mature GLP-2. More particularly, GLP-2 is a 33 amino acid peptide, co-secreted along with GLP-1 from intestinal endocrine cells in the small and large intestine.

[0140] “Insulin-like growth factor 1” or “IGF-1” means the human IGF-1 protein and species and sequence variants thereof having at least a portion of the biological activity of mature IGF-1. IGF-1 consists of 70 amino acids and is produced primarily by the liver as an endocrine hormone as well as in target tissues in a paracrine/autocrine fashion. IGF-1-containing fusion proteins of the invention can find particular use in the treatment of diabetes and insulin-resistance disorders for glucose regulation. IGF-1 has been cloned and expressed in E. coli and yeast, as described in U.S. Pat. No. 5,324,639.

[0141] “Insulin-like growth factor 2” or “IGF-2” means the human IGF-2 protein and species and sequence variants thereof having at least a portion of the biological activity of mature IGF-2. IGF-2 has been cloned, as described in Bell et al., 1985, Proc Natl Acad Sci USA. 82:6450-4.

[0142] “Islet neogenesis-associated protein” (INGAP), or “pancreatic beta cell growth factor” means the human INGAP peptide and species and sequence variants thereof having at least a portion of the biological activity of mature INGAP. INGAP-containing fusion proteins of the invention can find particular use in the treatment or prevention of diabetes and insulin-resistance disorders. INGAP has been cloned and expressed, as described in R Rafaeloff et al., 1997, J Clin Invest. 99(9): 2100-2109.

[0143] “Intermedin” or “AFP-6” means the human intermedin peptide and species and sequence variants thereof having at least a portion of the biological activity of mature intermedin. Intermedin treatment leads to blood pressure reduction both in normal and hypertensive human or animals, as well as the suppression of gastric emptying activity, and is implicated in glucose homeostasis. Intermedin-containing fusion proteins of the invention can find particular use in the treatment of diabetes, insulin-resistance disorders, and obesity. Intermedin peptides and variants have been cloned, as described in U.S. Pat. No. 6,965,013.

[0144] “Leptin” means the naturally occurring leptin from any species, as well as biologically active D-isoforms, or fragments and sequence variants thereof. Leptin-containing fusion proteins of the invention can find particular use in the treatment of diabetes for glucose regulation, insulin-resistance disorders, and obesity. Leptin has been cloned, as described in U.S. Pat. No. 7,112,659, and leptin analogs and fragments in U.S. Pat. Nos. 5,521,283, 5,532,336, PCT/US96/22308 and PCT/US96/01471.

[0145] “Neuromedin” means the neuromedin family of peptides including neuromedin U and S peptides, and sequence variants thereof. Included in the neuromedin U family are various truncated or splice variants, e.g., FLFHYSKTQKLGKSNVVEELQSPFASQSRGYFLFRPRN (SEQ ID NO: 180). Exemplary of the neuromedin S family is human neuromedin S with the sequence ILQRGSGTAAVDFTKKDHTATWGRPFFLFRPRN (SEQ ID NO: 181), particularly its amide form. Neuromedin fusion proteins of the invention can find particular use in treating obesity, diabetes, reducing food intake, and other related conditions and disorders as described herein.

[0146] “Oxyntomodulin”, or “OXM” means human oxyntomodulin and species and sequence variants thereof having at least a portion of the biological activity of mature OXM. OXM is a 37 amino acid peptide produced in the colon that contains the 29 amino acid sequence of glucagon followed by an 8 amino acid carboxyterminal extension. OXM-containing fusion proteins of the invention can find particular use in the treatment of diabetes for glucose regulation, insulin-resistance disorders, obesity, and can be used as a weight loss treatment.

[0147] “PYY” means human peptide YY polypeptide and species and sequence variants thereof having at least a portion of the biological activity of mature PYY. PPY-containing fusion proteins of the invention can find particular use in the treatment of diabetes for glucose regulation, insulin-resistance disorders, and obesity. Analogs of PYY have been prepared, as described in U.S. Pat. Nos. 5,604,203, 5,574,010 and 7,166,575.

[0148] “Urocortin” means a human urocortin peptide hormone and sequence variants thereof having at least a portion of the biological activity of mature urocortin. There are three human urocortins: Ucn-1, Ucn-2 and Ucn-3. Further urocortins and analogs have been described in U.S. Pat. No. 6,214,797. BPXTEN proteins comprising urocortin of the invention can also find particular use in treating or preventing conditions associated with stimulating ACTH release, hypertension due to vasodilatory effects, inflammation mediated via other than ACTH elevation, hyperthermia, appetite disorder, congestive heart failure, stress, anxiety, and psoriasis. Urocortin-containing fusion proteins can also be combined with a natriuretic peptide module, amylin family, and exendin family, or a GLP1 family module to provide an enhanced cardiovascular benefit, e.g. treating CHF, as by providing a beneficial vasodilation effect.

### Metabolic Disease and Cardiovascular Proteins

[0149] Metabolic and cardiovascular diseases represent a substantial health care burden in most developed nations, with cardiovascular diseases remaining the number one cause of death and disability in the United States and most European countries. Metabolic diseases and disorders include a large variety of conditions affecting the organs, tissues, and circulatory system of the body

[0150] Dyslipidemia is a frequent occurrence among diabetics and human or animals with cardiovascular disease; typically characterized by parameters such as elevated plasma triglycerides, low HDL (high density lipoprotein) cholesterol, normal to elevated levels of LDL (low density lipoprotein) cholesterol and increased levels of small dense, LDL particles in the blood. Dyslipidemia and hypertension is a main contributor to an increased incidence of coronary events, renal disease, and deaths among human or animals with metabolic diseases like diabetes and cardiovascular disease.

[0151] Cardiovascular disease can be manifest by many disorders, symptoms and changes in clinical parameters involving the heart, vasculature and organ systems throughout the body, including aneurysms, angina, atherosclerosis, cerebrovascular accident (Stroke), cerebrovascular disease, congestive heart failure, coronary artery disease, myocardial infarction, reduced cardiac output and peripheral vascular disease, hypertension, hypotension, blood markers (e.g., C-reactive protein, BNP, and enzymes such as CPK, LDH, SGPT, SGOT), amongst others.

[0152] Most metabolic processes and many cardiovascular parameters are regulated by multiple peptides and hormones (“metabolic proteins”), and many such peptides and hormones, as well as analogues thereof, have found utility in the treatment of such diseases and disorders. However, the use of therapeutic peptides and/or hormones, even when augmented by the use of small molecule drugs, has met with limited success in the management of such diseases and disorders. In particular, dose optimization is important for drugs and biologics used in the treatment of metabolic diseases, especially those with a narrow therapeutic window. Hormones in general, and peptides involved in glucose homeostasis often have a narrow therapeutic window. The narrow therapeutic window, coupled with the fact that such hormones and peptides typically have a short half-life which necessitates frequent dosing in order to achieve clinical benefit, results in difficulties in the management of such patients. Therefore, there remains a need for therapeutics with increased efficacy and safety in the treatment of metabolic diseases.

[0153] Thus, one aspect of the present invention is the incorporation of biologically active metabolic proteins and involved in or used in the treatment of metabolic and cardiovascular diseases and disorders into BPXTEN fusion proteins to create compositions with utility in the treatment of such disorders, disease and related conditions. The metabolic proteins can include any protein of biologic, therapeutic, or prophylactic interest or function that is useful for preventing, treating, mediating, or ameliorating a metabolic or cardiovascular disease, disorder or condition. Table 4d provides a non-limiting list of such sequences of metabolic BPs that are encompassed by the BPXTEN fusion proteins of the invention. Metabolic proteins of the inventive BPXTEN compositions can be a protein that exhibits at least about 80% sequence identity, or alternatively 81%, 82%, 83%, 84%, 85%, 86%, 87%, 88%, 89%, 90%, 91%, 92%, 93%, 94%, 95%, 96%, 97%, 98%, 99%, or 100% sequence identity to a protein sequence selected from Table 4d.

TABLE 4d
Biologically Active Proteins for Metabolic Disorders and Cardiology

| Name of Protein | | SEQ ID |
|---|---|---|
| (Synonym) | Sequence | NO. |
| Anti-CD3 | See U.S. Pat. Nos. 5,885,573 and 6,491,916 | |
| IL-1ra, human | MEICRGLRSHLITLLLFLFHSETICRPSGRKSSKMQAFRIWDVNQKTFYLRN | 1723 |
| full length | NQLVAGYLQGPNVNLEEKIDVVPIEPHALFLGIHGGKMCLSCVKSGDETRL | |
| | QLEAVNITDLSENRKQDKRFAFIRSDSGPTTSFESAACPGWFLCTAMEADQ | |
| | PVSLTNMPDEGVMVTKFYFQEDE | |
| IL-1ra, Dog | METCRCPLSYLISFLLFLPHSETACRLGKRPCRMQAFRIWDVNQKTFYLRN | 1724 |
| | NQLVAGYLQGSNTKLEEKLDVVPVEPHAVFLGIHGGKLCLACVKSGDETR | |
| | LQLEAVNITDLSKNKDQDKRFTFILSDSGPTTSFESAACPGWFLCTALEADR | |
| | PVSLTNRPEEAMMVTKFYFQKE | |
| IL-1ra, Rabbit | MRPSRSTRRHLISLLLFLFHSETACRPSGKRPCRMQAFRIWDVNQKTFYLR | 1725 |
| | NNQLVAGYLQGPNAKLEERIDVVPLEPQLLFLGIQRGKLCLSCVKSGDKM | |
| | KLHLEAVNITDLGKNKEQDKRFTFIRSNSGPTTTFESASCPGWFLCTALEAD | |
| | QPVSLTNTPDDSIVVTKFYFQED | |
| IL-1ra, Rat | MEICRGPYSHLISLLLILLFRSESAGHIPAGKRPCKMQAFRIWDTNQKTFYL | 1726 |
| | RNNQLIAGYLQGPNTKLEEKIDMVPIDFRNVFLGIHGGKLCLSCVKSGDDT | |
| | KLQLEEVNITDLNKNKEEDKRFTFIRSETGPTTSFESLACPGWFLCTTLEAD | |
| | HPVSLTNTPKEPCTVTKFYFQED | |
| IL-1ra, Mouse | MEICWGPYSHLISLLLILLFHSEAACRPSGKRPCKMQAFRIWDTNQKTFYLR | 1727 |
| | NNQLIAGYLQGPNIKLEEKIDMVPIDLHSVFLGIHGGKLCLSCAKSGDDIKL | |
| | QLEEVNITDLSKNKEEDKRFTFIRSEKGPTTSFESAACPGWFLCTTLEADRP | |
| | VSLTNTPEEPLIVTKFYFQEDQ | |
| Anakinra | MRPSGRKSSKMQAFRIWDVNQKTFYLRNNQLVAGYLQGPNVNLEEKIDV | 1728 |
| | VPIEPHALFLGIHGGKMCLSCVKSGDETRLQLEAVNITDLSENRKQDKRFA | |
| | FIRSDSGPTTSFESAACPGWFLCTAMEADQPVSLTNMPDEGVMVTKFYFQE | |
| | DE | |
| α-natriuretic | SLRRSSCFGGRMDRIGAQSGLGCNSFRY | 1729 |
| peptide (ANP) | | |
| β-natriuretic | SPKMVQGSGGFGRKMDRISSSSGLGCKVLRRH | 1730 |
| peptide, human | | |
| (BNP human) | | |
| Brain | NSKMAHSSSCFGQKIDRIGAVSRLGCDGLRLF | 1731 |
| natriuretic | | |
| peptide, Rat; | | |
| (BNP Rat) | | |
| C-type | GLSKGCFGLKLDRIGSMSGLGC | 1732 |
| natriuretic | | |
| peptide (CNP, | | |
| porcine) | | |
| Fibroblast | PALPEDGGSGAFPPGHFKDPKRLYCKNGGFFLRIHPDGRVDGVREKSDPHI | 1733 |
| growth factor 2 | KLQLQAEERGVVSIKGVCANRYLAMKEDGRLLASKCVTDECFFFERLESN | |
| (FGF-2) | NYNTYRS RKYTSWYVAL KRTGQYKLGS KTGPGQKAIL FLPMSAKS | |
| TNF receptor | LPAQVAFTPYAPEPGSTCRLREYYDQTAQMCCSKCSPGQHAKVFCTKTSD | 1734 |
| (TNFR) | TVCDSCEDSTYTQLWNWVPECLSCGSRCSSDQVETQACTREQNRICTCRPG | |
| | WYCALSKQEGCRLCAPLRKCRPGFGVARPGTETSDVVCKPCAPGTFSNTTS | |
| | STDICRPHQICNVVAIPGNASMDAVCTSTSPTRSMAPGAVHLPQPVSTRSQH | |
| | TQPTPEPSTAPSTSFLLPMGPSPPAEGSTGD | |

[0154] “Anti-CD3” means the monoclonal antibody against the T cell surface protein CD3, species and sequence variants, and fragments thereof, including OKT3 (also called muromonab) and humanized anti-CD3 monoclonal antibody (hOKT31(Ala-Ala))(Herold et al., 2002, New England Journal of Medicine 346:1692-1698) Anti-CD3-containing fusion proteins of the invention can find particular use to slow new-onset Type 1 diabetes, including use of the anti-CD3 as a therapeutic effector as well as a targeting moiety for a second therapeutic BP in the BPXTEN composition. The sequences for the variable region and the creation of anti-CD3 have been described in U.S. Pat. Nos. 5,885,573 and 6,491,916.

[0155] “IL-1ra” means the human IL-1 receptor antagonist protein and species and sequence variants thereof, including the sequence variant anakinra (Kineret®), having at least a portion of the biological activity of mature IL-1ra. Anakinra is a nonglycosylated, recombinant human IL-1ra and differs from endogenous human IL-1ra by the addition of an N-terminal methionine. A commercialized version of anakinra is marketed as Kineret®. It binds with the same avidity to IL-1 receptor as native IL-1ra and IL-1b, but does not result in receptor activation (signal transduction), an effect attributed to the presence of only one receptor binding motif on IL-1ra versus two such motifs on IL-1α and IL-1β. Anakinra has 153 amino acids and 17.3 kD in size, and has a reported half-life of approximately 4-6 hours.

[0156] Increased IL-1 production has been reported in patients with various microbial infectious diseases and a variety of other diseases. IL-1ra-containing fusion proteins of the invention can find particular use in the treatment of any of the foregoing diseases and disorders. IL-1ra has been cloned, as described in U.S. Pat. Nos. 5,075,222 and 6,858,409.

[0157] “Natriuretic peptides” means atrial natriuretic peptide (ANP), brain natriuretic peptide (BNP or B-type natriuretic peptide) and C-type natriuretic peptide (CNP); both human and non-human species and sequence variants thereof having at least a portion of the biological activity of the mature counterpart natriuretic peptides. Sequences of useful forms of natriuretic peptides are disclosed in U.S. Patent Publication 20010027181. Examples of ANPs include human ANP (Kangawa et al., 1984, BBRC 118:131) or that from various species, including pig and rat ANP (Kangawa et al., 1984, BBRC 121:585). Sequence analysis revealed that preproBNP consists of 134 residues and is cleaved to a 108-amino acid ProBNP. Cleavage of a 32-amino acid sequence from the C-terminal end of ProBNP results in human BNP (77-108), which is the circulating, physiologically active form. The 32-amino acid human BNP involves the formation of a disulfide bond (Sudoh et al., 1989, BBRC 159:1420) and U.S. Pat. Nos. 5,114,923, 5,674,710, 5,674,710, and 5,948,761. BPXTEN-containing one or more natriuretic functions can be useful in treating hypertension, diuresis inducement, natriuresis inducement, vascular conduct dilatation or relaxation, natriuretic peptide receptors (such as NPR-A) binding, aldostrerone secretion suppression from the adrenal gland, treatment of cardiovascular diseases and disorders, reducing, stopping or reversing cardiac remodeling after a cardiac event or as a result of congestive heart failure, treatment of renal diseases and disorders; treatment or prevention of ischemic stroke, and treatment of asthma.

[0158] “Heparin-binding growth factor 2” or “FGF-2” means the human FGF-2 protein, and species and sequence variants thereof having at least a portion of the biological activity of the mature counterpart. FGF-2 has been cloned, as described in Burgess, W. H. and Maciag, T., Ann. Rev. Biochem., 58:575-606 (1989); Coulier, F., et al., 1994, Prog. Growth Factor Res. 5:1; and the PCT publication WO 87/01728.

[0159] “TNF receptor” means the human receptor for TNF, and species and sequence variants thereof having at least a portion of the biological receptor activity of mature TNFR. The x-ray crystal structure of the complex formed by the extracellular domain of the human p55 TNF receptor and TNFβ has been determined (Banner et al., 1993 Cell 73:431, incorporated herein by reference).

### Coagulation Factors

[0160] In hemophilia, the clotting of blood is disturbed by a lack of certain plasma blood clotting factors. Human factor IX (FIX) is a zymogen of a serine protease that is an important component of the intrinsic pathway of the blood coagulation cascade. Factor VIIa (FVIIa) proteins have found utility for the treatment of bleeding episodes in hemophilia A or B patients with inhibitors to FVIII or FIX and in patients with acquired hemophilia, as well as prevention of bleeding in surgical interventions or invasive procedures in hemophilia A or B patients with inhibitors to FVIII or FIX. Thus, there remains a need for factor IX and factor VIIa compositions with extended half-life and retention of activity when administered as part of a preventive and/or therapeutic regimen for hemophilia B, as well as formulations that reduce side effects and can be administered by both intravenous and subcutaneous routes.

[0161] The coagulation factors for inclusion in the BPXTEN of the invention can include proteins of biologic, therapeutic, or prophylactic interest or function that are useful for preventing, treating, mediating, or ameliorating blood coagulation disorders, diseases, or deficiencies. Suitable coagulation proteins include biologically active polypeptides that are involved in the coagulation cascade as substrates, enzymes or co-factors.

[0162] Table 4e provides a non-limiting list of sequences of coagulation factors that are encompassed by the BPXTEN fusion proteins of the invention. Coagulation factors for inclusion in the BPXTEN of the invention can be a protein that exhibits at least about 80% sequence identity, or alternatively 81%, 82%, 83%, 84%, 85%, 86%, 87%, 88%, 89%, 90%, 91%, 92%, 93%, 94%, 95%, 96%, 97%, 98%, 99%, or 100% sequence identity to a protein sequence selected from Table 4e.

TABLE 4e
Coagulation Factor Polypeptide Sequences

| BPXTEN | SEQ ID | |
|---|---|---|
| Name | NO: | Amino Acid Sequence |
| FIX | 1735 | MQRVNMIMAESPGLITICLLGYLLSAECTVFLDHENANKILNRPKRYNSGKLEEFV |
| precursor | | QGNLERECMEEKCSFEEAREVFENTERTTEFWKQYVDGDQCESNPCLNGGSCKD |
| | | DINSYECWCPFGFEGKNCELDVTCNIKNGRCEQFCKNSADNKVVCSCTEGYRLAE |
| | | NQKSCEPAVPFPCGRVSVSQTSKLTRAETVFPDVDYVNSTEAETILDNITQSTQSFN |
| | | DFTRVVGGEDAKPGQFPWQVVLNGKVDAFCGGSIVNEKWIVTAAHCVETGVKIT |
| | | VVAGEHNIEETEHTEQKRNVIRIIPHHNYNAAINKYNHDIALLELDEPLVLNSYVTPI |
| | | CIADKEYTNIFLKFGSGYVSGWGRVFHKGRSALVLQYLRVPLVDRATCLRSTKFTI |
| | | YNNMFCAGFHEGGRDSCQGDSGGPHVTEVEGTSFLTGIISWGEECAMKGKYGIYT |
| | | KVSRYVNWIKEKTKLT |
| FIX | 1736 | YNSGKLEEFVQGNLERECMEEKCSFEEAREVFENTERTTEFWKQYVDGDQCESNP |
| Homo | | CLNGGSCKDDINSYECWCPFGFEGKNCELDVTCNIKNGRCEQFCKNSADNKVVCS |
| sapiens | | CTEGYRLAENQKSCEPAVPFPCGRVSVSQTSKLTRAETVFPDVDYVNSTEAETILD |
| | | NITQSTQSFNDFTRVVGGEDAKPGQFPWQVVLNGKVDAFCGGSIVNEKWIVTAAH |
| | | CVETGVKITVVAGEHNIEETEHTEQKRNVIRIIPHHNYNAAINKYNHDIALLELDEP |
| | | LVLNSYVTPICIADKEYTNIFLKFGSGYVSGWGRVFHKGRSALVLQYLRVPLVDRA |
| | | TCLRSTKFTIYNNMFCAGFHEGGRDSCQGDSGGPHVTEVEGTSFLTGIISWGEECA |
| | | MKGKYGIYTKVSRYVNWIKEKTKLT |
| Sequence | 1737 | MQRVNMIMAESPGLITICLLGYLLSAECTVFLDHENANKILNRPKRYNSGKLEEFV |
| 4 from | | QGNLERECMEEKCSFEEAREVFENTERTTEFWKQYVDGDQCESNPCLNGGSCKD |
| Patent US | | DINSYECWCPFGFEGKNCELDVTCNIKNGRCEQFCKNSADNKVVCSCTEGYRLAE |
| 20080214462 | | NQKSCEPAVPFPCGRVSVSQTSKLTRAEAVFPDVDYVNSTEAETILDNITQSTQSFN |
| | | DFTRVVGGEDAKPGQFPWQVVLNGKVDAFCGGSIVNEKWIVTAAHCVETGVKIT |
| | | VVAGEHNIEETEHTEQKRNVIRIIPHHNFNAAINTYNHDIALLELDEPLVNSYVTPIC |
| | | IADKEYTNIFLKFGSGYVSGWGRVFHKGRSALVLQYLRVPLVDRATCLRSTKFTIY |
| | | NNMFCAGFHEGGRDSCQGDSGGPHVTEVEGTSFLTGIISWGEECAMKGKYGIYTK |
| | | VSRYVNWIKEKTKLT |
| Sequence | 1738 | MQRVNMIMAESPGLITICLLGYLLSAECTVFLDHENANKILNRPKRYNSGKLEEFV |
| 6 from | | QGNLERECMEEKCSFEEAREVFENTERTTEFWKQYVDGDQCESNPCLNGGSCKD |
| Patent US | | DINSYECWCPFGFEGKNCELDVTCNIKNGRCEQFCKNSADNKVVCSCTEGYRLAE |
| 20080214462 | | NQKSCEPAVPFPCGRVSVSQTSKLTRAEAVFPDVDYVNSTEAETILDNITQSTQSFN |
| | | DFTRVVGGEDAKPGQFPWQVVLNGKVDAFCGGSIVNEKWIVTAAHCVETGVKIT |
| | | VVAGEHNIEETEHTEQKRNVIRIIPHHNFNAAINTYNHDIALLELDEPLVNSYVTPIC |
| | | IADKEYTNIFLKFGSGYVSGWGRVFHKGRSALVLQYLRVPLVDRATCLRSTKFTIF |
| | | NNMFCAGFHEGGRDSCQGDSGGPHVTEVEGTSFLTGIISWGEECAMKGKYGIYTK |
| | | VSRYVNWIKEKTKLT |
| Sequence | 1739 | MQRVNMIMAESPGLITICLLGYLLSAECTVFLDHENANKILNRPKRYNSGKLEEFV |
| 8 from | | QGNLERECMEEKCSFEEAREVFENTERTTEFWKQYVDGDQCESNPCLNGGSCKD |
| Patent US | | DINSYECWCPFGFEGKNCELDVTCNIKNGRCEQFCKNSADNKVVCSCTEG |
| 20080214462 | | YRLAENQKSCEPAVPFPCGRVSVSQTSKLTRAEAVFPDVDYVNSTEAETILDNITQS |
| | | TQSFNDFTRVVGGEDAKPGQFPWQVVLNGKVDAFCGGSIVNEKWIVTAAHCVET |
| | | GVKITVVAGEHNIEETEHTEQKRNVIRIIPHHNFNAAINTYNHDIALLELDEPLVLNS |
| | | YVTPICIADKEYTNIFLKFGSGYVSGWGRVFHKGRSALVLQYLRVPLVDATCLRST |
| | | KFTIFNNMFCAGFHEGGRDSCQGDSGGPHVTEVEGTSFLTGIVSWGEGCAMKGKY |
| | | GIYTKVSRYVNWIKEKTKLT |
| Sequence | 1740 | MQRVNMIMAESPSLITICLLGYLLSAECTVFLDHENANKILNRPKRYNSGKLEEFV |
| 2 from | | QGNLERECMEEKCSFEEPREVFENTEKITEFWKQYVDGDQCESNPCLNGGSCKDDI |
| Patent US | | NSYECWCPFGFEGKNCELDVTCNIKNGRCEQFCKNSADNKVVCSCTEGYRLAEN |
| 7125841 | | QKSCEPAVPFPCGRVSVSQTSKLTRAEAVFPDVDYVNPTEAETILDNITQGTQSFND |
| | | FTRVVGGEDAKPGQFPWQVVLNGKVDAFCGGSIVNEKWIVTAAHCVETGVKITV |
| | | VAGEHNIEETEHTEQKRNVIRAIIPHHNYNAAINKYNHDIALLELDEPLVLNSYVTPI |
| | | CIADKEYTNIFLKFGSGYVSGWARVFHKGRSALVLQYLRVPLVDRATCLRSTKFTI |
| | | YNNMFCAGFHEGGRDSCQGDSGGPHVTEVEGTSFLTGIISWGEECAMKGKYGIYT |
| | | KVSRYVNWIKEKTKLT |
| Sequence | 1741 | YNSGKLEEFVQGNLERECMEEKCSFEEAREVFENTERTTEFWKQYVDGDQCESNP |
| 1 from | | CLNGGSCKDDINSYECWCPFGFEGKNCELDATCNIKNGRCEQFCKNSADNKVVCS |
| Patent US | | CTEGYRLAENQKSCEPAVPFPCGRVSVSQTSKLTRAETVFPDVDYVNSTEAETILD |
| 20080167219 | | NITQSTQSFNDFTRVVGGEDAKPGQFPWQVVLNGKVDAFCGGSIVNEKWIVTAAH |
| | | CVETGVKITVVAGEHNIEETEHTEQKRNVIRIIPHHNYNAAINKYNHDIALLELDEP |
| | | LVLNSYVTPICIADKEYTNIFLKFGSGYVSGWGRVFHKGRSALVLQYLRVPLVDRA |
| | | TCLRSTKFTIYNNMFCAGFHEGGRDSCQGDSGGPHVTEVEGTSFLTGIISWGEECA |
| | | MKGKYGIYTKVSRYVNWIKEKTKLT |
| Sequence | 1742 | YNSGKLEEFVQGNLERECMEEKCSFEEAREVFENTERTTEFWKQYVDGDQCESNP |
| 2 from | | CLNGGSCKDDINSYECWCPFGFEGKNCELDVTCNIKNGRCEQFCKNSADNKVVCS |
| Patent US | | CTEGYRLAENQKSCEPAVPFPCGRVSVSQTSKLTRAETVFPDVDYVNSTEAETILD |
| 20080167219 | | NITQSTQSFNDFTRVVGGEDAKPGQFPWQVVLNGKVDAFCGGSIVNEKWIVTAAH |
| | | CVETGVKITVVAGEHNIEETEHTEQKRNVIRIIPHHNYNAAINKYNHDIALLELDAP |
| | | LVLNSYVTPICIADKEYTNIFLKFGSGYVSGWGRVFHKGRSALVLQYLRVPLVDRA |
| | | TCLRSTKFTIYNNMFCAGFHEGGRDSCQGDSGGPHVTEVEGTSFLTGIISWGEECA |
| | | MKGKYGIYTKVSRYVNWIKEKTKLT |
| Sequence | 1743 | YNSGKLEEFVQGNLERECMEEKCSFEEAREVFENTERTTEFWKQYVDGDQCESNP |
| 3 from | | CLNGGSCKDDINSYECWCPFGFEGKNCELDATCNIKNGRCEQFCKNSADNKVVCS |
| Patent US | | CTEGYRLAENQKSCEPAVPFPCGRVSVSQTSKLTRAETVFPDVDYVNSTEAETILD |
| 20080167219 | | NITQSTQSFNDFTRVVGGEDAKPGQFPWQVVLNGKVDAFCGGSIVNEKWIVTAAH |
| | | CVETGVKITVVAGEHNIEETEHTEQKRNVIRIIPHHNYNAAINKYNHDIALLELDAP |
| | | LVLNSYVTPICIADKEYTNIFLKFGSGYVSGWGRVFHKGRSALVLQYLRVPLVDRA |
| | | TCLRSTKFTIYNNMFCAGFHEGGRDSCQGDSGGPHVTEVEGTSFLTGIISWGEECA |
| | | MKGKYGIYTKVSRYVNWIKEKTKLT |
| Sequence | 1744 | YNSGKLEEFVQGNLERECMEEKCSFEEAREVFENTERTTEFWKQYVDGDQCESNP |
| 4 from | | CLNGGSCKDDINSYECWCPFGFEGKNCELDATCNIKNGRCEQFCKNSADNKVVCS |
| Patent US | | CTEGYRLAENQKSCEPAVPFPCGRVSVSQTSKLTRAETVFPDVDYVNSTEAETILD |
| 20080167219 | | NITQSTQSFNDFTRVVGGEDAKPGQFPWQVVLNGKVDAFCGGSIVNEKWIVTAAH |
| | | CVETGVKITVVAGEHNIEETEHTEQKRNVIRIIPHHNYNAAINKYNHDIALLELDEP |
| | | LVLNSYVTPICIADKEYTNIFLKFGSGYVSGWGRVFHKGRSALVLQYLRVPLVDRA |
| | | TCLASTKFTIYNNMFCAGFHEGGRDSCQGDSGGPHVTEVEGTSFLTGIISWGEECA |
| | | MKGKYGIYTKVSRYVNWIKEKTKLT |
| Sequence | 1745 | YNSGKLEEFVQGNLERECMEEKCSFEEAREVFENTERTTEFWKQYVDGDQCESNP |
| 5 from | | CLNGGSCKDDINSYECWCPFGFEGKNCELDVTCNIKNGRCEQFCKNSADNKVVCS |
| Patent US | | CTEGYRLAENQKSCEPAVPFPCGRVSVSQTSKLTRAETVFPDVDYVNSTEAETILD |
| 20080167219 | | NITQSTQSFNDFTRVVGGEDAKPGQFPWQVVLNGKVDAFCGGSIVNEKWIVTAAH |
| | | CVETGVKITVVAGEHNIEETEHTEQKRNVIRIIPHHNYNAAINKYNHDIALLELDAP |
| | | LVLNSYVTPICIADKEYTNIFLKFGSGYVSGWGRVFHKGRSALVLQYLRVPLVDRA |
| | | TCLASTKFTIYNNMFCAGFHEGGRDSCQGDSGGPHVTEVEGTSFLTGIISWGEECA |
| | | MKGKYGIYTKVSRYVNWIKEKTKLT |
| Sequence | 1746 | YNSGKLEEFVQGNLERECMEEKCSFEEAREVFENTERTTEFWKQYVDGDQCESNP |
| 6 from | | CLNGGSCKDDINSYECWCPFGFEGKNCELDATCNIKNGRCEQFCKNSADNKVVCS |
| Patent US | | CTEGYRLAENQKSCEPAVPFPCGRVSVSQTSKLTRAETVFPDVDYVNSTEAETILD |
| 20080167219 | | NITQSTQSFNDFTRVVGGEDAKPGQFPWQVVLNGKVDAFCGGSIVNEKWIVTAAH |
| | | CVETGVKITVVAGEHNIEETEHTEQKRNVIRIIPHHNYNAAINKYNHDIALLELDAP |
| | | LVLNSYVTPICIADKEYTNIFLKFGSGYVSGWGRVFHKGRSALVLQYLRVPLVDRA |
| | | TCLASTKFTIYNNMFCAGFHEGGRDSCQGDSGGPHVTEVEGTSFLTGIISWGEECA |
| | | MKGKYGIYTKVSRYVNWIKEKTKLT |
| Factor | 1747 | ANAFLEELRPGSLERECKEEQCSFEEAREIFKDAERTKLFWISYSDGDQCASSPCQN |
| VII/VIIa | | GGSCKDQLQSYICFCLPAFEGRNCETHKDDQLICVNENGGCEQYCSDHTGTKRSC |
| | | RCHEGYSLLADGVSCTPTVEYPCGKIPILEKRNASKPQGRIVGGKVCPKGECPWQV |
| | | LLLVNGAQLCGGTLINTIWVVSAAHCFDKIKNWRNLIAVLGEHDLSEHDGDEQSR |
| | | RVAQVIIPSTYVPGTTNHDIALLRLHQPVVLTDHVVPLCLPERTFSERTLAFVRFSL |
| | | VSGWGQLLDRGATALELMVLNVPRLMTQDCLQQSRKVGDSPNITEYMFCAGYSD |
| | | GSKDSCKGDSGGPHATHYRGTWYLTGIVSWGQGCATVGHFGVYTRVSQYIEWLQ |
| | | KLMRSEPRPGVLLRAPFP |

[0163] “Factor IX” (“FIX”) includes the human Factor IX protein and species and sequence variants thereof having at least a portion of the biological receptor activity of mature Factor IX. In some embodiments, the FIX peptide is a structural analog or peptide mimetic of any of the FIX peptides described herein, including the sequences of Table 4e. In some embodiments, the FIX peptide is a structural analog or peptide mimetic of any of the FIX peptides described herein, including the sequences of Table 4e. In one specific example of the present invention, the FIX is human FIX. In another embodiment, the FIX is a polypeptide sequence from Table 4e. Mature Factor IX is a single chain protein of 415 amino acid residues that contains approximately 17% carbohydrate by weight (Schmidt 2003, Trends Cardiovasc Med, 13: 39).

[0164] In some cases, the coagulation factor is Factor IX, a sequence variant of Factor IX, or a Factor IX moiety, such as the exemplary sequences of Table 4e, as well as any protein or polypeptide substantially homologous thereto whose biological properties result in the activity of Factor IX.

[0165] “Factor VII” (FVII) means the human protein, and species and sequence variants thereof having at least a portion of the biological activity of activated Factor VII. Factor VII and recombinant human FVIIa has been introduced for use in uncontrollable bleeding in hemophilia patients (with Factor VIII or IX deficiency) who have developed inhibitors against replacement coagulation factor. Recombinant human factor VIIa has utility in treatment of uncontrollable bleeding in hemophilia patients (with Factor VIII or IX deficiency), including those who have developed inhibitors against replacement coagulation factor. In some embodiments, the FVII peptide is the activated form (FVIIa), a structural analog or peptide mimetic of any of the FVII peptides described herein, including sequences of Table 4e. Factor VII and VIIa have been cloned, as described in U.S. Pat. No. 6,806,063 and US Patent Application No. 20080261886.

### Growth Hormone Proteins

[0166] “Growth Hormone” or “GH” means the human growth hormone protein and species and sequence variants thereof, and includes, but is not limited to, the 191 single-chain amino acid human sequence of GH. The invention contemplates inclusion in the BPXTEN of any GH homologous sequences, sequence fragments that are natural, such as from primates, mammals (including domestic animals), and non-natural sequence variants which retain at least a portion of the biologic activity or biological function of GH and/or that are useful for preventing, treating, mediating, or ameliorating a GH-related disease, deficiency, disorder or condition. Non-mammalian GH sequences are well-described in the literature. For example, a sequence alignment of fish GHs can be found in Genetics and Molecular Biology 2003 26 p. 295-300. In addition, native sequences homologous to human Gil can be found by standard homology searching techniques, such as NCBI BLAST.

[0167] In one embodiment, the Gil incorporated into the human or animal compositions can be a recombinant polypeptide with a sequence corresponding to a protein found in nature. In another embodiment, the Gil can be a sequence variant, fragment, homolog, or a mimetics of a natural sequence that retains at least a portion of the biological activity of the native Gil. Table 4f provides a nonlimiting list of sequences of Gils from a wide variety of mammalian species that are encompassed by the BPXTEN fusion proteins of the invention. Any of these Gil sequences or homologous derivatives constructed by shuffling individual mutations between species or families can be useful for the fusion proteins of this invention. Gil that can be incorporated into a BPXTEN fusion protein can include a protein that exhibits at least about 80% sequence identity, or alternatively 81%, 82%, 83%, 84%, 85%, 86%, 87%, 88%, 89%, 90%, 91%, 92%, 93%, 94%, 95%, 96%, 97%, 98%, 99%, or 100% sequence identity to a protein selected from Table 4f.

TABLE 4f
Growth Hormone Amino Acid Sequences From Animal Species

| | | SEQ ID |
|---|---|---|
| Species GH | Amino Acid Sequence | NO. |
| Man | FPTIPLSRLFDNAMLRAHRLHQLAFDTYQEFEEAYIPKEQKYSFLQNPQTSLCF | 1750 |
| | SESIPTPSNREETQQKSNLELLRISLLLIQSWLEPVQFLRSVFANSLVYGASDSN | |
| | VYDLLKDLEEGIQTLMGRLEDGSPRTGQIFKQTYSKFDTNSHNDDALLKNYG | |
| | LLYCFRKDMDKVETFLRIVQCRSVEGSCGF | |
| Pig | FPAMPLSSLFANAVLRAQHLHQLAADTYKEFERAYIPEGQRYSIQNAQAAFC | 1751 |
| | FSETIPAPTGKDEAQQRSDVELLRFSLLLIQSWLGPVQFLSRVFTNSLVFGTSD | |
| | RVYEKLKDLEEGIQALMRELEDGSPRAGQILKQTYDKFDTNLRSDDALLKNY | |
| | GLLSCFKKDLHKAETYLRVMKCRRFVESSCAF | |
| Alpaca | FPAMPLSSLFANAVLRAQHLHQLAADTYKEFERTYIPEGQRYSIQNAQAAFCF | 1752 |
| | SETIPAPTGKDEAQQRSDVELLRFSLLLIQSWLGPVQFLSRVFTNSLVFGTSDR | |
| | VYEKLKDLEEGIQALMRELEDGSPRAGQILRQTYDKFDTNLRSDDALLKNYG | |
| | LLSCFKKDLHKAETYLRVMKCRRFVESSCAF | |
| Camel | FPAMPLSSLFANAVLRAQHLHQLAADTYKEFERTYIPEGQRYSIQNAQAAFCF | 1753 |
| | SETIPAPTGKDEAQQRSDVELLRFSLLLIQSWLGPVQFLSRVFTNSLVFGTSDR | |
| | VYEKLKDLEEGIQALMRELEDGSPRAGQILRQTYDKFDTNLRSDDALLKNYG | |
| | LLSCFKKDLHKAETYLRVMKCRRFVESSCAF | |
| Horse | FPAMPLSSLFANAVLRAQHLHQLAADTYKEFERAYIPEGQRYSIQNAQAAFC | 1754 |
| | FSETIPAPTGKDEAQQRSDMELLRFSLLLIQSWLGPVQLLSRVFTNSLVFGTSD | |
| | RVYEKLRDLEEGIQALMRELEDGSPRAGQILKQTYDKFDTNLRSDDALLKNY | |
| | GLLSCFKKDLHKAETYLRVMKCRRFVESSCAF | |
| Elephant | FPAMPLSSLFANAVLRAQHLHQLAADTYKEFERAYIPEGQRYSIQNAQAAFC | 1755 |
| | FSETIPAPTGKDEAQQRSDVELLRFSLLLIQSWLGPVQFLSRVFTNSLVFGTSD | |
| | RVYEKLKDLEEGIQALMRELEDGSPRPGQVLKQTYDKFDTNMRSDDALLKN | |
| | YGLLSCFKKDLHKAETYLRVMKCRRFVESSCAF | |
| Red fox | FPAMPLSSLFANAVLRAQHLHQLAADTYKEFERAYIPEGQRYSIQNAQAAFC | 1756 |
| | FSETIPAPTGKDEAQQRSDVELLRFSLVLIQSWLGPLQFLSRVFTNSLVFGTSD | |
| | RVYEKLKDLEEGIQALMRELEDGSPRAGQILKQTYDKFDTNLRSDDALLKNY | |
| | GLLSCFKKDLHKAETYLRVMKCRRFVESSCAF | |
| Dog | FPAMPLSSLFANAVLRAQHLHQLAADTYKEFERAYIPEGQRYSIQNAQAAFC | 1757 |
| | FSETIPAPTGKDEAQQRSDVELLRFSLLLIQSWLGPVQFLSRVFTNSLVFGTSD | |
| | RVYEKLKDLEEGIQALMRELEDGSPRAGQILKQTYDKFDTNLRSDDALLKNY | |
| | GLLSCFKKDLHKAETYLRVMKCRRFVESSCAF | |
| Cat | FPAMPLSSLFANAVLRAQHLHQLAADTYKEFERAYIPEGQRYSIQNAQAAFC | 1758 |
| | FSETIPAPTGKDEAQQRSDVELLRFSLLLIQSWLGPVQFLSRVFTNSLVFGTSD | |
| | RVYEKLKDLEEGIQALMRELEDGSPRGGQILKQTYDKFDTNLRSDDALLKNY | |
| | GLLSCFKKDLHKAETYLRVMKCRRFVESSCAF | |
| American | FPAMPLSSLFANAVLRAQHLHQLAADTYKDFERAYIPEGQRYSIQNAQAAFC | 1759 |
| mink | FSETIPAPTGKDEAQQRSDMELLRFSLLLIQSWLGPVQFLSRVFTNSLVFGTSD | |
| | RVYEKLKDLEEGIQALMRELEDGSPRAGPILKQTYDKFDTNLRSDDALLKNY | |
| | GLLSCFKKDLHKAETYLRVMKCRRFVESSCAF | |
| Finback | FPAMPLSSLFANAVLRAQHLHQLAADTYKEFERAYIPEGQRYSIQNAQAAFC | 1760 |
| whale | FSETIPAPTGKDEAQQRSDVELLRFSLLLIQSWLGPVQFLSRVFTNSLVFGTSD | |
| | RVYEKLKDLEEGIQALMRELEDGSPRAGQILKQTYDKFDTNMRSDDALLKN | |
| | YGLLSCFKKDLHKAETYLRVMKCRRFVESSCAF | |
| Dolphin | FPAMPLSSLFANAVLRAQHLHQLAADTYKEFERAYIPEGQRYSIQNTQAAFCF | 1761 |
| | SETIPAPTGKDEAQQRSDVELLRFSLLLIQSWLGPVQFLSRVFTNSLVFGTSDR | |
| | VYEKLKDLEEGIQALMRELEDGSPRAGQILKQTYDKFDTNMRSDDALLKNY | |
| | GLLSCFKKDLHKAETYLRVMKCRRFVESSCAF | |
| Hippo | FPAMPLSSLFANAVLRAQHLHQLAADTYKEFERAYIPEGQRYSIQNTQAAFCF | 1762 |
| | SETIPAPTGKDEAQQRSDVELLRFSLLLIQSWLGPVQFLSRVFTNSLVFGTSDR | |
| | VYEKLKDLEEGIQALMRELEDGSPRAGQILKQTYDKFDTNMRSDDALLKNY | |
| | GLLSCFKKDLHKAETYLRVMKCRRFVESSCAF | |
| Rabbit | FPAMPLSSLFANAVLRAQHLHQLAADTYKEFERAYIPEGQRYSIQNAQAAFC | 1763 |
| | FSETIPAPTGKDEAQQRSDMELLRFSLLLIQSWLGPVQFLSRAFTNTLVFGTSD | |
| | RVYEKLKDLEEGIQALMRELEDGSPRVGQLLKQTYDKFDTNLRGDDALLKN | |
| | YGLLSCFKKDLHKAETYLRVMKCRRFVESSCVF | |
| Rat | FPAMPLSSLFANAVLRAQHLHQLAADTYKEFERAYIPEGQRYSIQNAQAAFC | 1764 |
| | FSETIPAPTGKEEAQQRTDMELLRFSLLLIQSWLGPVQFLSRIFTNSLMFGTSD | |
| | RVYEKLKDLEEGIQALMQELEDGSPRIGQILKQTYDKFDANMRSDDALLKNY | |
| | GLLSCFKKDLHKAETYLRVMKCRRFAESSCAF | |
| Mouse | FPAMPLSSLFSNAVLRAQHLHQLAADTYKEFERAYIPEGQRYSIQNAQAAFCF | 1765 |
| | SETIPAPTGKEEAQQRTDMELLRFSLLLIQSWLGPVQFLSRIFTNSLMFGTSDR | |
| | VYEKLKDLEEGIQALMQELEDGSPRVGQILKQTYDKFDANMRSDDALLKNY | |
| | GLLSCFKKDLHKAETYLRVMKCRRFVESSCAF | |
| Hamster | FPAMPLSSLFANAVLRAQHLHQLAADTYKEFERAYIPEGQRYSIQNAQTAFCF | 1766 |
| | SETIPAPTGKEEAQQRSDMELLRFSLLLIQSWLGPVQFLSRIFTNSLMFGTSDR | |
| | VYEKLKDLEEGIQALMQELEDGSPRVGQILKQTYDKFDTNMRSDDALLKNY | |
| | GLLSCFKKDLHKAETYLRVMKCRRFVESSCAF | |
| Mole rat | FPAMPLSNLFANAVLRAQHLHQLAADTYKEFERAYIPEGQRYSIQNAQAAFC | 1767 |
| | FSETIPAPTGKEEAQQRSDMELLRFSLLLIQSWLGPVQFLSRVFTNSLVFGTSD | |
| | RVFEKLKDLEEGIQALMRELEDGSLRAGQLLKQTYDKFDTNMRSDDALLKN | |
| | YGLLSCFKKDLHKAETYLRVMKCRRFVESSCAF | |
| Guinea pig | FPAMPLSSLFGNAVLRAQHLHQLAADTYKEFERTYIPEGQRYSIHNTQTAFCF | 1768 |
| | SETIPAPTDKEEAQQRSDVELLHFSLLLIQSWLGPVQFLSRVFTNSLVFGTSDR | |
| | VYEKLKDLEEGIQALMRELEDGTPRAGQILKQTYDKFDTNLRSNDALLKNYG | |
| | LLSCFRKDLHRTETYLRVMKCRRFVESSCAF | |
| Ox | AFPAMSLSGLFANAVLRAQHLHQLAADTFKEFERTYIPEGQRYSIQNTQVAFC | 1769 |
| | FSETIPAPTGKNEAQQKSDLELLRISLLLIQSWLGPLQFLSRVFTNSLVFGTSDR | |
| | VYEKLKDLEEGILALMRELEDGTPRAGQILKQTYDKFDTNMRSDDALLKNY | |
| | GLLSCFRKDLHKTETYLRVMKCRRFGEASCAF | |
| Sheep/Goat | AFPAMSLSGLFANAVLRAQHLHQLAADTFKEFERTYIPEGQRYSIQNTQVAFC | 1770 |
| | FSETIPAPTGKNEAQQKSDLELLRISLLLIQSWLGPLQFLSRVFTNSLVFGTSDR | |
| | VYEKLKDLEEGILALMRELEDVTPRAGQILKQTYDKFDTNMRSDDALLKNY | |
| | GLLSCFRKDLHKTETYLRVMKCRRFGEASCAF | |
| Red deer | FPAMSLSGLFANAVLRAQHLHQLAADTFKEFERTYIPEGQRYSIQNTQVAFCF | 1771 |
| | SETIPAPTGKNEAQQKSDLELLRISLLLIQSWLGPLQFLSRVFTNSLVFGTSDRV | |
| | YEKLKDLEEGILALMRELEDGTPRAGQILKQTYDKFDTNMRSDDALLKNYGL | |
| | LSCFRKDLHKTETYLRVMKCRRFGEASCAF | |
| Giraffe | AFPAMSLSGLFANAVLRAQHLHQLAADTFKEFERTYIPEGQRYSIQNTQVAFC | 1772 |
| | FSETIPAPTGKNEAQQKSDLELLRISLLLIQSWLGPLQFLSRVFSNSLVFGTSDR | |
| | VYEKLKDLEEGILALMRELEDGTPRAGQILKQTYDKFDTNMRSDDALLKNY | |
| | GLLSCFRKDLHKTETYLRVMKCRRFGEASCAF | |
| Chevrotain-1 | FPAMSLSGLFANAVLRVQHLHQLAADTFKEFERTYIPEGQRYSIQNTQVAFCF | 1773 |
| | SETIPAPTGKNEAQQKSDLELLRISLLLIQSWLGPLQFLSRVFTNSLVFGTSDRV | |
| | YEKLKDLEEGILALMRELEDGPPRAGQILKQTYDKFDTNMRSDDALLKNYGL | |
| | LSCFRKDLHKTETYLRVMKCRRFGEASCAF | |
| Slow loris | FPAMPLSSLFANAVLRAQHLHQLAADTYKEFERAYIPEGQRYSIQNAQAAFC | 1774 |
| | FSETIPAPTGKDEAQQRSDMELLRFSLLLIQSWLGPVQLLSRVFTNSLVLGTSD | |
| | RVYEKLKDLEEGIQALMRELEDGSPRVGQILKQTYDKFDTNLRSDDALLKNY | |
| | GLLSCFKKDLHKAETYLRVMKCRRFVESSCAF | |
| Marmoset | FPTIPLSRLLDNAMLRAHRLHQLAFDTYQEFEEAYIPKEQKYSFLQNPQTSLCF | 1775 |
| | SESIPTPASKKETQQKSNLELLRMSLLLIQSWFEPVQFLRSVFANSLLYGVSDS | |
| | DVYEYLKDLEEGIQTLMGRLEDGSPRTGEIFMQTYRKFDVNSQNNDALLKNY | |
| | GLLYCFRKDMDKVETFLRIVQCR-SVEGSCGF | |
| BrTailed | FPAMPLSSLFANAVLRAQHLHQLVADTYKEFERTYIPEAQRHSIQSTQTAFCF | 1776 |
| Possum | SETIPAPTGKDEAQQRSDVELLRFSLLLIQSWLSPVQFLSRVFTNSLVFGTSDR | |
| | VYEKLRDLEEGIQALMQELEDGSSRGGLVLKTTYDKFDTNLRSDEALLKNYG | |
| | LLSCFKKDLHKAETYLRVMKCRRFVESSCAF | |
| Monkey | FPTIPLSRLFDNAMLRAHRLHQLAFDTYQEFEEAYIPKEQKYSFLQNPQTSLCF | 1777 |
| (rhesus) | SESIPTPSNREETQQKSNLELLRISLLLIQSWLEPVQFLRSVFANSLVYGTSYSD | |
| | VYDLLKDLEEGIQTLMGRLEDGSSRTGQIFKQTYSKFDTNSHNNDALLKNYG | |
| | LLYCFRKDMDKIETFLRIVQCR-SVEGSCGF | |

### Cytokines

[0168] The BP can be a cytokine or one or more cytokines. The cytokines refer to proteins (e.g., chemokines, interferons, lymphokines, interleukins, and tumor necrosis factors) released by cells which can affect cell behavior. Cytokines can be produced by a broad range of cells, including immune cells such as macrophages, B lymphocytes, T lymphocytes and mast cells, as well as endothelial cells, fibroblasts, and various stromal cells. A given cytokine can be produced by more than one type of cell. Cytokines can be involved in producing systemic or local immunomodulatory effects.

[0169] Certain cytokines can function as pro-inflammatory cytokines. Pro-inflammatory cytokines refer to cytokines involved in inducing or amplifying an inflammatory reaction. Pro-inflammatory cytokines can work with various cells of the immune system, such as neutrophils and leukocytes, to generate an immune response. Certain cytokines can function as anti-inflammatory cytokines. Anti-inflammatory cytokines refer to cytokines involved in the reduction of an inflammatory reaction. Anti-inflammatory cytokines, in some cases, can regulate a pro-inflammatory cytokine response. Some cytokines can function as both pro- and anti-inflammatory cytokines.

[0170] Cytokines encompassed by the inventive compositions can have utility in the treatment in various therapeutic or disease categories, including but not limited to cancer, rheumatoid arthritis, multiple sclerosis, myasthenia gravis, systemic lupus erythematosus, Alzheimer's disease, Schizophrenia, viral infections (e.g., chronic hepatitis C, AIDS), allergic asthma, retinal neurodegenerative processes, metabolic disorder, insulin resistance, and diabetic cardiomyopathy. Cytokines can be especially useful in treating inflammatory conditions and autoimmune conditions.

[0171] Examples of cytokines that are regulatable by systems and compositions of the present disclosure include, but are not limited to lymphokines, monokines, and traditional polypeptide hormones except for human growth hormone. Included among the cytokines are parathyroid hormone; thyroxine; insulin; proinsulin; relaxin; prorelaxin; glycoprotein hormones such as follicle stimulating hormone (FSH), thyroid stimulating hormone (TSH), and luteinizing hormone (LH); hepatic growth factor; fibroblast growth factor; prolactin; placental lactogen; tumor necrosis factor-alpha; mullerian-inhibiting substance; mouse gonadotropin-associated peptide; inhibin; activin; vascular endothelial growth factor; integrin; thrombopoietin (TPO); nerve growth factors such as NGF-alpha; platelet-growth factor; transforming growth factors (TGFs) such as TGF-alpha, TGF-beta, TGF-beta1, TGF-beta2, and TGF-beta3; insulin-like growth factor-I and -II; erythropoietin (EPO); Flt-3L; stem cell factor (SCF); osteoinductive factors; interferons (IFNs) such as IFN-α, IFN-β, IFN-γ; colony stimulating factors (CSFs) such as macrophage-CSF (M-CSF); granulocyte-macrophage-CSF (GM-CSF); granulocyte-CSF (G-CSF); macrophage stimulating factor (MSP); interleukins (ILs) such as IL-1, IL-1a, IL-1b, IL-1RA, IL-18, IL-2, IL-3, IL-4, IL-5, IL-6, IL-7, IL-8, IL-9, IL-10, IL-11, IL-12, IL-12b, IL-13, IL-14, IL-15, IL-16, IL-17, IL-20; a tumor necrosis factor such as CD154, LT-beta, TNF-alpha, TNF-beta, 4-1BBL, APRIL, CD70, CD153, CD178, GITRL, LIGHT, OX40L, TALL-1, TRAIL, TWEAK, TRANCE; and other polypeptide factors including LIF, oncostatin M (OSM) and kit ligand (KL). Cytokine receptors refer to the receptor proteins which bind cytokines. Cytokine receptors can be both membrane-bound and soluble.

[0172] The target polynucleotide can encode for a cytokine. Non-limiting examples of cytokines include 4-1BBL, activin βA, activin βB, activin βC, activin βE, artemin (ARTN), BAFF/BLyS/TNFSF138, BMP10, BMP15, BMP2, BMP3, BMP4, BMP5, BMP6, BMP7, BMP8a, BMP8b, bone morphogenetic protein 1 (BMP1), CCL1/TCA3, CCL11, CCL12/MCP-5, CCL13/MCP-4, CCL14, CCL15, CCL16, CCL17/TARC, CCL18, CCL19, CCL2/MCP-1, CCL20, CCL21, CCL22/MDC, CCL23, CCL24, CCL25, CCL26, CCL27, CCL28, CCL3, CCL3L3, CCL4, CCL4L1/LAG-1, CCL5, CCL6, CCL7, CCL8, CCL9, CD153/CD30L/TNFSF8, CD40L/CD154/TNFSF5, CD40LG, CD70, CD70/CD27L/TNFSF7, CLCF1, c-MPL/CD110/TPOR, CNTF, CX3CL1, CXCL1, CXCL10, CXCL11, CXCL12, CXCL13, CXCL14, CXCL15, CXCL16, CXCL17, CXCL2/MIP-2, CXCL3, CXCL4, CXCL5, CXCL6, CXCL7/Ppbp, CXCL9, EDA-A1, FAM19A1, FAM19A2, FAM19A3, FAM19A4, FAM19A5, Fas Ligand/FASLG/CD95L/CD178, GDF10, GDF11, GDF15, GDF2, GDF3, GDF4, GDF5, GDF6, GDF7, GDF8, GDF9, glial cell line-derived neurotrophic factor (GDNF), growth differentiation factor 1 (GDF1), IFNA1, IFNA10, IFNA13, IFNA14, IFNA2, IFNA4, IFNA5/IFNaG, IFNA7, IFNA8, IFNB1, IFNE, IFNG, IFNZ, IFNω/IFNW1, IL11, IL18, IL18BP, ILlA, IL1B, IL1F10, IL1F3/IL1RA, IL1F5, IL1F6, IL1F7, IL1F8, IL1F9, IL1RL2, IL31, IL33, IL6, IL8/CXCL8, inhibin-A, inhibin-B, Leptin, LIF, LTA/TNFB/TNFSF1, LTB/TNFC, neurturin (NRTN), OSM, OX-40L/TNFSF4/CD252, persephin (PSPN), RANKL/OPGL/TNFSF11(CD254), TL1A/TNFSF15, TNFA, TNF-alpha/TNFA, TNFSF10/TRAIL/APO-2L(CD253), TNFSF12, TNFSF13, TNFSF14/LIGHT/CD258, XCL1, and XCL2. In some embodiments, the target gene encodes for an immune checkpoint inhibitor. Non-limiting examples of such immune checkpoint inhibitors include PD-1, CTLA-4, LAG3, TIM-3, A2AR, B7-H3, B7-H4, BTLA, IDO, KIR, and VISTA. In some embodiments, the target gene encodes for a T cell receptor (TCR) alpha, beta, gamma, and/or delta chain.

[0173] In some cases, the cytokine can be a chemokine. The chemokine can be selected from a group including, but not limited to, ARMCX2, BCA-1/CXCL13, CCL11, CCL12/MCP-5, CCL13/MCP-4, CCL15/MIP-5/MIP-1 delta, CCL16/HCC-4/NCC4, CCL17/TARC, CCL18/PARC/MIP-4, CCL19/MIP-3b, CCL2/MCP-1, CCL20/MIP-3 alpha/MIP3A, CCL21/6Ckine, CCL22/MDC, CCL23/MIP 3, CCL24/Eotaxin-2/MPIF-2, CCL25/TECK, CCL26/Eotaxin-3, CCL27/CTACK, CCL28, CCL3/Mipla, CCL4/MIP1B, CCL4L1/LAG-1, CCL5/RANTES, CCL6/C10, CCL8/MCP-2, CCL9, CML5, CXCL1, CXCL10/Crg-2, CXCL12/SDF-1 beta, CXCL14/BRAK, CXCL15/Lungkine, CXCL16/SR-PSOX, CXCL17, CXCL2/MIP-2, CXCL3/GRO gamma, CXCL4/PF4, CXCL5, CXCL6/GCP-2, CXCL9/MIG, FAM19A1, FAM19A2, FAM19A3, FAM19A4/TAFA4, FAM19A5, Fractalkine/CX3CL1, I-309/CCL1/TCA-3, IL-8/CXCL8, MCP-3/CCL7, NAP-2/PPBP/CXCL7, XCL2, and Armo IL10.

[0174] Table 4g provides a non-limiting list of such sequences of BPs that are encompassed by the BPXTEN fusion proteins of the invention. Metabolic proteins of the inventive BPXTEN compositions can be a protein that exhibits at least about 80% sequence identity, or alternatively 81%, 82%, 83%, 84%, 85%, 86%, 87%, 88%, 89%, 90%, 91%, 92%, 93%, 94%, 95%, 96%, 97%, 98%, 99%, or 100% sequence identity to a protein sequence selected from Table 4g.

TABLE 4g
Cytokines for Conjugation

| Name of Protein | | SEQ ID |
|---|---|---|
| (Synonym) | Amino Acid Sequence | NO. |
| Anti-CD3 | See U.S. Pat. Nos. 5,885,573 and 6,491,916 | |
| IL-1ra, human | MEICRGLRSHLITLLLFLFHSETICRPSGRKSSKMQAFRIWDVNQKTFYLR | 270 |
| full length | NNQLVAGYLQGPNVNLEEKIDVVPIEPHALFLGIHGGKMCLSCVKSGDETR | |
| | LQLEAVNITDLSENRKQDKRFAFIRSDSGPTTSFESAACPGWFLCTAMEAD | |
| | QPVSLTNMPDEGVMVTKFYFQEDE | |
| IL-1ra, Dog | METCRCPLSYLISFLLFLPHSETACRLGKRPCRMQAFRIWDVNQKTFYLRN | 271 |
| | NQLVAGYLQGSNTKLEEKLDVVPVEPHAVFLGIHGGKLCLACVKSGDETRL | |
| | QLEAVNITDLSKNKDQDKRFTFILSDSGPTTSFESAACPGWFLCTALEADR | |
| | PVSLTNRPEEAMMVTKFYFQKE | |
| IL-1ra, Rabbit | MRPSRSTRRHLISLLLFLFHSETACRPSGKRPCRMQAFRIWDVNQKTFYLR | 272 |
| | NNQLVAGYLQGPNAKLEERIDVVPLEPQLLFLGIQRGKLCLSCVKSGDKMK | |
| | LHLEAVNITDLGKNKEQDKRFTFIRSNSGPTTTFESASCPGWFLCTALEAD | |
| | QPVSLTNTPDDSIVVTKFYFQED | |
| IL-1ra, Rat | MEICRGPYSHLISLLLILLFRSESAGHIPAGKRPCKMQAFRIWDTNQKTFY | 273 |
| | LRNNQLIAGYLQGPNTKLEEKIDMVPIDFRNVFLGIHGGKLCLSCVKSGDD | |
| | TKLQLEEVNITDLNKNKEEDKRFTFIRSETGPTTSFESLACPGWFLCTTLE | |
| | ADHPVSLTNTPKEPCTVTKFYFQED | |
| IL-1ra, Mouse | MEICWGPYSHLISLLLILLFHSEAACRPSGKRPCKMQAFRIWDTNQKTFYL | 274 |
| | RNNQLIAGYLQGPNIKLEEKIDMVPIDLHSVFLGIHGGKLCLSCAKSGDDI | |
| | KLQLEEVNITDLSKNKEEDKRFTFIRSEKGPTTSFESAACPGWFLCTTLEA | |
| | DRPVSLTNTPEEPLIVTKFYFQEDQ | |
| Anakinra | MRPSGRKSSKMQAFRIWDVNQKTFYLRNNQLVAGYLQGPNVNLEEKIDVVP | 275 |
| | IEPHALFLGIHGGKMCLSCVKSGDETRLQLEAVNITDLSENRKQDKRFAFI | |
| | RSDSGPTTSFESAACPGWFLCTAMEADQPVSLTNMPDEGVMVTKFYFQEDE | |
| IL-10 | MHSSALLCCLVLLTGVRASPGQGTQSENSCTHFPGNLPNMLRDLRDAFSR | 276 |
| | VKTFFQMKDQLDNLLLKESLLEDFKGYLGCQALSEMIQFYLEEVMPQAEN | |
| | QDPDIKAHVNSLGENLKTLRLRLRRCHRFLPCENKSKAVEQVKNAFNKLQ | |
| | EKGIYKAMSEFDIFINYIEAYMTMKIRN | |

[0175] “IL-1ra” means the human IL-1 receptor antagonist protein and species and sequence variants thereof, including the sequence variant anakinra (Kineret®), having at least a portion of the biological activity of mature IL-1ra. Human IL-1ra is a mature glycoprotein of 152 amino acid residues. IL-1ra-containing fusion proteins of the invention can find particular use in the treatment of any of the foregoing diseases and disorders. IL-1ra has been cloned, as described in U.S. Pat. Nos. 5,075,222 and 6,858,409.

[0176] In some cases, the BP can be IL-10. IL-10 can be an effective anti-inflammatory cytokine that represses the production of the proinflammatory cytokines and chemokines. IL-10 can be useful for the treatment of autoimmune diseases and inflammatory diseases such as rheumatoid arthritis, multiple sclerosis, myasthenia gravis, systemic lupus erythematosus, Alzheimer's, Schizophrenia, allergic asthma, retinal neurodegenerative processes, and diabetes.

[0177] In some cases, IL-10 can be modified to improve stability and decrease prolytic degradation. The modification can be one or more amide bond substitution. In some cases, one or more amide bonds within backbone of IL-10 can be substituted to achieve the abovementioned effects. The one or more amide linkages (—CONH—) in IL-10 can be replaced with a linkage which is an isostere of an amide linkage, such as —CH₂NH—, —CH₂S—, —CH₂CH₂—, —CH═CH— (cis and trans), —COCH₂—, —CH(OH)CH₂— or —CH₂SO—. Furthermore, the amide linkages in IL-10 can also be replaced by a reduced isostere pseudopeptide bond. See Couder et al. (1993) Int. J. Peptide Protein Res. 41:181-184, which is hereby incorporated by reference in its entirety.

[0178] The one or more acidic amino acids, including aspartic acid, glutamic acid, homoglutamic acid, tyrosine, alkyl, aryl, arylalkyl, and heteroaryl sulfonamides of 2,4-diaminopriopionic acid, ornithine or lysine and tetrazole-substituted alkyl amino acids; and side chain amide residues such as asparagine, glutamine, and alkyl or aromatic substituted derivatives of asparagine or glutamine; as well as hydroxyl-containing amino acids, including serine, threonine, homoserine, 2,3-diaminopropionic acid, and alkyl or aromatic substituted derivatives of serine or threonine can be substituted.

[0179] The one or more hydrophobic amino acids in IL-10 such as alanine, leucine, isoleucine, valine, norleucine, (S)-2-aminobutyric acid, (S)-cyclohexylalanine or other simple alpha-amino acids can be substituted with amino acids including, but not limited to, an aliphatic side chain from C1-C10 carbons including branched, cyclic and straight chain alkyl, alkenyl or alkynyl substitutions

[0180] In some cases, the one or more hydrophobic amino acids in IL-10 such as can be substituted substitution of aromatic-substituted hydrophobic amino acids, including phenylalanine, tryptophan, tyrosine, sulfotyrosine, biphenylalanine, 1-naphthylalanine, 2-naphthylalanine, 2-benzothienylalanine, 3-benzothienylalanine, histidine, including amino, alkylamino, dialkylamino, aza, halogenated (fluoro, chloro, bromo, or iodo) or alkoxy (from C₁-C₄)-substituted forms of the above-listed aromatic amino acids, illustrative examples of which are: 2-, 3- or 4-aminophenylalanine, 2-, 3- or 4-chlorophenylalanine, 2-, 3- or 4-methylphenylalanine, 2-, 3- or 4-methoxyphenylalanine, 5-amino-, 5-chloro-, 5-methyl- or 5-methoxytryptophan, 2′-, 3′-, or 4′-amino-, 2′-, 3′-, or 4′-chloro-, 2, 3, or 4-biphenylalanine, 2′-, 3′-, or 4′-methyl-, 2-, 3- or 4-biphenylalanine, and 2- or 3-pyridylalanine;

[0181] The one or more hydrophobic amino acids in IL-10 such as phenylalanine, tryptophan, tyrosine, sulfotyrosine, biphenylalanine, 1-naphthylalanine, 2-naphthylalanine, 2-benzothienylalanine, 3-benzothienylalanine, histidine, including amino, alkylamino, dialkylamino, aza, halogenated (fluoro, chloro, bromo, or iodo) or alkox can be substituted by aromatic amino acids including: 2-, 3- or 4-aminophenylalanine, 2-, 3- or 4-chlorophenylalanine, 2-, 3- or 4-methylphenylalanine, 2-, 3- or 4-methoxyphenylalanine, 5-amino-, 5-chloro-, 5-methyl- or 5-methoxytryptophan, 2′-, 3′-, or 4′-amino-, 2′-, 3′-, or 4′-chloro-, 2, 3, or 4-biphenylalanine, 2′-, 3′-, or 4′-methyl-, 2-, 3- or 4-biphenylalanine, and 2- or 3-pyridylalanine

[0182] The amino acids comprising basic side chains, including arginine, lysine, histidine, ornithine, 2,3-diaminopropionic acid, homoarginine, including alkyl, alkenyl, or aryl-substituted derivatives of the previous amino acids, can be substituted. Examples are N-epsilon-isopropyl-lysine, 3-(4-tetrahydropyridyl)-glycine, 3-(4-tetrahydropyridyl)-alanine, N,N-gamma, gamma′-diethyl-homoarginine, alpha-methyl-arginine, alpha-methyl-2,3-diaminopropionic acid, alpha-methyl-histidine, and alpha-methyl-ornithine where the alkyl group occupies the pro-R position of the alpha-carbon. The modified IL-10 can comprise amides formed from any combination of alkyl, aromatic, heteroaromatic, ornithine, or 2,3-diaminopropionic acid, carboxylic acids or any of the many well-known activated derivatives such as acid chlorides, active esters, active azolides and related derivatives, lysine, and ornithine.

[0183] In some cases, IL-10 comprises can comprise one or more naturally occurring L-amino acids, synthetic L-amino acids, and/or D-enantiomers of an amino acid. The IL-10 polypeptide can comprise one or more of the following amino acids: ω-aminodecanoic acid, ω-aminotetradecanoic acid, cyclohexylalanine, α,γ-diaminobutyric acid, α,β-diaminopropionic acid, δ-amino valeric acid, t-butylalanine, t-butylglycine, N-methylisoleucine, phenylglycine, cyclohexylalanine, norleucine, naphthylalanine, ornithine, citrulline, 4-chlorophenylalanine, 2-fluorophenylalanine, pyridylalanine 3-benzothienyl alanine, hydroxyproline, β-alanine, o-aminobenzoic acid, m-aminobenzoic acid, p-aminobenzoic acid, m-aminomethylbenzoic acid, 2,3-diaminopropionic acid, α-aminoisobutyric acid, N-methylglycine(sarcosine), 3-fluorophenylalanine, 4-fluorophenylalanine, penicillamine, 1,2,3,4-tetrahydroisoquinoline-3-carboxylic acid, β-2-thienylalanine, methionine sulfoxide, homoarginine, N-acetyl lysine, 2,4-diamino butyric acid, rho-aminophenylalanine, N-methylvaline, homocysteine, homoserine, ε-amino hexanoic acid, ω-aminohexanoic acid, ω-aminoheptanoic acid, ω-aminooctanoic acid, and 2,3-diaminobutyric acid.

[0184] IL-10 can comprise a cysteine residue or a cysteine which can act as linker to another peptide via a disulfide linkage or to provide for cyclization of the IL-10 polypeptide. Methods of introducing a cysteine or cysteine analog are known in the art; see, e.g., U.S. Pat. No. 8,067,532. An IL-10 polypeptide can be cyclized. Other means of cyclization include introduction of an oxime linker or a lanthionine linker; see, e.g., U.S. Pat. No. 8,044,175. Any combination of amino acids (or non-amino acid moieties) that can form a cyclizing bond can be used and/or introduced. A cyclizing bond can be generated with any combination of amino acids (or with an amino acid and —(CH₂)ₙCO— or —(CH₂)ₙCH₄—CO—) with functional groups which allow for the introduction of a bridge. Some examples are disulfides, disulfide mimetics such as the —(CH₂)ₙ-carba bridge, thioacetal, thioether bridges (cystathionine or lanthionine) and bridges containing esters and ethers.

[0185] The IL-10 can be substituted with an N-alkyl, aryl, or backbone crosslinking to construct lactams and other cyclic structures, C-terminal hydroxymethyl derivatives, o-modified derivatives, N-terminally modified derivatives including substituted amides such as alkylamides and hydrazides. In some cases, an IL-10 polypeptide is a retroinverso analog.

[0186] IL-10 can be IL-10 can be native protein, peptide fragment IL-10, or modified peptide, having at least a portion of the biological activity of native IL-10. IL-10 can be modified to improve intracellular uptake. One such modification can be attachment of a protein transduction domain. The protein transduction domain can be attached to the C-terminus of the IL-10. Alternatively, the protein transduction domain can be attached to the N-terminus of the IL-10. The protein transduction domain can be attached to IL-10 via covalent bond. The protein transduction domain can be chosen from any of the sequences listed in Table 4h.

TABLE 4h
Exemplary protein transduction domains

| SEQ ID NO | Amino Acid Sequence |
|---|---|
| 277 | YGRKKRRQRRR; |
| 278 | RRORRTSKLMKR |
| 279 | GWTLNSAGYLLGKINLKALAALAKKIL |
| 280 | KALAWEAKLAKALAKALAKHLAKALAKALKCEA |
| 281 | ROIKIWFQNRRMKWKK |
| 282 | YGRKKRRORRR |
| 283 | RKKRRQRRR |
| 284 | YGRKKRRORRR |
| 285 | RKKRRORR |
| 286 | YARAAARQARA |
| 287 | THRLPRRRRRR |
| 288 | GGRRARRRRRR |

[0187] The BP of the human or animal compositions are not limited to native, full-length polypeptides, but also include recombinant versions as well as biologically and/or pharmacologically active variants or fragments thereof. For example, the skilled worker will appreciate that various amino acid substitutions can be made in the BP to create variants without departing from the spirit of the invention with respect to the biological activity or pharmacologic properties of the BP. Examples of conservative substitutions for amino acids in polypeptide sequences are shown in Table 5. However, in embodiments of the BPXTEN in which the sequence identity of the BP is less than 100% compared to a specific sequence disclosed herein, the invention contemplates substitution of any of the other 19 natural L-amino acids for a given amino acid residue of the given BP, which can be at any position within the sequence of the BP, including adjacent amino acid residues. If any particular substitution results in an undesirable change in biological activity, then an alternative amino acid can be employed and the construct evaluated by the methods described herein, or using any of the techniques and guidelines for conservative and non-conservative mutations set forth, for instance, in U.S. Pat. No. 5,364,934, the contents of which is incorporated by reference in its entirety, or using methods generally known to those of skill in the art. In addition, variants can also include, for instance, polypeptides wherein one or more amino acid residues are added or deleted at the N- or C-terminus of the full-length native amino acid sequence of a BP that retains at least a portion of the biological activity of the native peptide.

TABLE 5
Exemplary conservative amino acid substitutions

| Original Residue | Exemplary Substitutions |
|---|---|
| Ala (A) | val; leu; ile |
| Arg (R) | lys; gin; asn |
| Asn (N) | gin; his; Iys; arg |
| Asp (D) | glu |
| Cys (C) | ser |
| Gln (Q) | asn |
| Glu (E) | asp |
| Gly (G) | pro |
| His (H) | asn: gin: lys: arg |
| xIle (I) | leu; val; met; ala; phe: norleucine |
| Leu (L) | norleucine: ile: val; met; ala: phe |
| Lys (K) | arg: gin: asn |
| Met (M) | leu; phe; ile |
| Phe (F) | leu: val: ile; ala |
| Pro (P) | gly |
| Ser (S) | thr |
| Thr (T) | ser |
| Trp (W) | tyr |
| Tyr(Y) | trp: phe: thr: ser |
| Val (V) | ile; leu; met; phe; ala; norleucine |

[0188] In some embodiments, a BP incorporated into a BPXTEN polypeptide can have a sequence that exhibits at least about 80% sequence identity to a sequence from Tables 4a-4h, alternatively at least about 81%, or about 82%, or about 83%, or about 84%, or about 85%, or about 86%, or about 87%, or about 88%, or about 89%, or about 90%, or about 91%, or about 92%, or about 93%, or about 94%, or about 95%, or about 96%, or about 97%, or about 98%, or about 99%, or 100% sequence identity as compared with a sequence from Tables 4a-4h. In some embodiments, a BP incorporated into a BPXTEN can be a bispecific sequence comprising a first binding domain and a second binding domain, wherein the first binding domain, having specific binding affinity to a tumor-specific marker or an antigen of a target cell, exhibits at least about 80% sequence identity, or alternatively 81%, 82%, 83%, 84%, 85%, 86%, 87%, 88%, 89%, 90%, 91%, 92%, 93%, 94%, 95%, 96%, 97%, 98%, 99%, or 100% sequence identity to paired VL and VH sequences of an anti-CD3 antibody selected from Table 6f; and wherein the second binding domain, having specific binding affinity to an effector cell, exhibits at least about 80% sequence identity, or alternatively 81%, 82%, 83%, 84%, 85%, 86%, 87%, 88%, 89%, 90%, 91%, 92%, 93%, 94%, 95%, 96%, 97%, 98%, 99%, or 100% sequence identity to paired VL and VH sequences of an anti-target cell antibody selected from Table 6a. The BP of the foregoing embodiments can be evaluated for activity using assays or measured or determined parameters as described herein, and those sequences that retain at least about 40%, or about 50%, or about 55%, or about 60%, or about 70%, or about 80%, or about 90%, or about 95% or more activity compared to the corresponding native BP sequence would be considered suitable for inclusion in the human or animal BPXTEN. The BP found to retain a suitable level of activity can be linked to one or more XTEN polypeptides described hereinabove or anywhere else herein. In one embodiment, a BP found to retain a suitable level of activity can be linked to one or more XTEN polypeptides, having at least about 80% sequence identity (e.g., at least about 81%, at least about 82%, at least about 83%, at least about 84%, at least about 85%, at least about 86%, at least about 87%, at least about 88%, at least about 89%, at least about 90%, at least about 91%, at least about 92%, at least about 93%, at least about 94%, at least about 95%, at least about 96%, at least about 97%, at least about 98%, at least about 99%, or 100% sequence identity) to a sequence from Tables 3a-3b, resulting in a chimeric fusion protein.

### T Cell Engagers

[0189] Additional structural configuration formulae of BPXTEN relate to XTENylated Protease-Activated T Cell Engagers (“XPAT” or “XPATs”), wherein BP is a bispecific antibody (e.g., a bispecific T-cell engager). In some embodiments, the XPAT composition comprises a first portion comprising a first binding domain and a second binding domain, a second portion comprising the release segment, and a third portion comprising XTEN bulking moiety. In some embodiments, the XPAT composition has the configuration of Formula Ia (depicted N-terminus to C-terminus):

$$( first portion ) - ( second portion ) - ( third portion ) \qquad ( Ia )$$

[0190] wherein first portion is a bispecific comprising two scFv wherein the first binding domain has specific binding affinity to a tumor-specific marker or an antigen of a target cell and the second binding domain has specific binding affinity to an effector cell; the second portion comprises a release segment (RS) capable of being cleaved by a mammalian protease (as described more fully hereinbelow, the protease can be tumor- or antigen-specific, thereby activation); and the third portion is a bulking moiety. In the foregoing embodiment, the first portion binding domains can be in the order (VL-VH)1-(VL-VH)2, wherein “1” and “2” represent the first and second binding domains, respectively, or (VL-VH)1-(VH-VL)2, or (VH-VL)1-(VL-VH)2, or (VH-VL)1-(VH-VL)2, wherein the paired binding domains are linked by a polypeptide linker (as described more fully hereinbelow). In one embodiment, alternatives for the first portion VL and VH are identified in Tables 6a-6f; alternatives for RS are identified in the sequences set forth in Tables 8a-8b (as described more fully hereinbelow); and alternatives for the bulking moiety is identified herein by: XTEN; albumin binding domain; albumin; IgG binding domain; polypeptides consisting of proline, serine, and alanine; fatty acid; Fc domain; polyethylene glycol (PEG), PLGA; and hydroxylethyl starch. Where desired, the bulking moiety is an XTEN having at least about 90%, 91%, 92%, 93%, 94%, 95%, 96%, 97%, 98%, 99%, or 100% sequence identity to a sequence identified by the sequences set forth in Tables 3a-3b. In the foregoing embodiments, the composition is a recombinant fusion protein. In another embodiment, the portions are linked by chemical conjugation.

[0191] In another embodiment, the XPAT composition has the configuration of Formula IIa (depicted N-terminus to C-terminus):

$$( third portion ) - ( second portion ) - ( first portion ) \qquad ( IIa )$$

[0192] wherein first portion is a bispecific comprising two scFv wherein the first binding domain has specific binding affinity to a tumor-specific marker or an antigen of a target cell and the second binding domain has specific binding affinity to an effector cell; the second portion comprises a release segment (RS) capable of being cleaved by a mammalian protease; and the third portion is a bulking moiety. In the foregoing embodiment, the first portion binding domains can be in the order (VL-VH)1-(VL-VH)2, wherein “1” and “2” represent the first and second binding domains, respectively, or (VL-VH)1-(VH-VL)2, or (VH-VL)1-(VL-VH)2, or (VH-VL)1-(VH-VL)2, wherein the paired binding domains are linked by a polypeptide linker as described herein, below. In one embodiment, alternatives for the first portion VL and VH are identified in Tables 6a-6f; alternatives for RS are identified in the sequences set forth in Tables 8a-8b; and alternatives for the bulking moiety are identified herein by: XTEN; albumin binding domain; albumin; IgG binding domain; polypeptides consisting of proline, serine, and alanine; fatty acid; and Fc domain. Where desired, the bulking moiety is an XTEN having at least about 90%, 91%, 92%, 93%, 94%, 95%, 96%, 97%, 98%, 99%, or 100% sequence identity to a sequence selected from the group of sequences set forth in Tables 3a-3b. In the foregoing embodiments, the composition is a recombinant fusion protein. In another embodiment, the portions are linked by chemical conjugation.

[0193] In another embodiment, the XPAT composition has the configuration of Formula IIIa (depicted N-terminus to C-terminus):

$$( fifth portion ) - ( fourth portion ) - ( first portion ) - ( second portion ) - ( third portion ) \qquad ( IIIa )$$

[0194] wherein first portion is a bispecific comprising two scFv wherein the first binding domain has specific binding affinity to a tumor-specific marker or an antigen of a target cell and the second binding domain has specific binding affinity to an effector cell; the second portion comprises a release segment (RS) capable of being cleaved by a mammalian protease; the third portion is a bulking moiety; the fourth portion comprises a release segment (RS) capable of being cleaved by a mammalian protease which can be identical or different from the second portion; and the fifth portion is a bulking moiety that can be identical or can be different from the third portion. In the foregoing embodiment, the first portion binding domains can be in the order (VL-VH)1-(VL-VH)2, wherein “1” and “2” represent the first and second binding domains, respectively, or (VL-VH)1-(VH-VL)2, or (VH-VL)1-(VL-VH)2, or (VH-VL)1-(VH-VL)2, wherein the paired binding domains are linked by a polypeptide linker as described herein, below. In the foregoing embodiments, alternatives for RS are identified in the sequences set forth in Tables 8a-8b. In the foregoing embodiments, alternatives for the bulking moiety are identified herein by: XTEN; albumin binding domain; albumin; IgG binding domain; polypeptides consisting of proline, serine, and alanine; fatty acid; and Fc domain. Where desired, the bulking moiety is an XTEN having at least about 90%, 91%, 92%, 93%, 94%, 95%, 96%, 97%, 98%, 99%, or 100% sequence identity to a sequence selected from the group of sequences set forth in Tables 3a-3b. In the foregoing embodiments, the composition is a recombinant fusion protein. In another embodiment, the portions are linked by chemical conjugation.

[0195] The human or animal compositions, based on their design and specific components, advantageously provide bispecific therapeutics that have more selectivity, greater half-life, and result in less toxicity and fewer side effects once they are cleaved by proteases found in associated with the target tissues or tissues rendered unhealthy by a disease, wherein the human or animal compositions have improved therapeutic index compared to bispecific antibody compositions known in the art. Such compositions are useful in the treatment of certain diseases, including, but not limited to cancer as set forth herein. Without being limited to any mechanistic theory, the skilled worker will appreciate that the compositions of the instant invention achieve this reduction in non-specific interactions by a combination of mechanisms, which include steric hindrance by locating the binding domains to the bulky XTEN molecules, wherein flexible, unstructured characteristics of XTEN polypeptides, by being tethered to the composition, are able to oscillate and move around the binding domains, providing blocking between the composition and tissues or cells, as well as providing a reduction in the ability of the intact composition to penetrate a cell or tissue due to the large molecular mass (contributed to by both the actual molecular weight of the XTEN polypeptide(s) and due to the large hydrodynamic radius of the unstructured XTEN polypeptides) compared to the size of the individual binding domains. However, the compositions are designed wherein when in proximity to a target tissue or cell bearing or secreting a protease capable of cleaving the RS, or when internalized into a target cell or tissue when a binding domain has bound the ligand, the bispecific binding domains are liberated from the bulk of the XTEN by the action of the protease(s), removing the steric hindrance barrier, and is freer to exert its pharmacologic effect. The human or animal compositions find use in the treatment of a variety of conditions where selective delivery of a therapeutic bispecific antibody composition to a cell, tissue or organ is desired. In one embodiment, the target tissue is a cancer, which can be a leukemia, a lymphoma, or a tumor of an organ or system.

### Binding Domains

[0196] The disclosure contemplates use of single chain binding domains, such as but not limited to Fv, Fab, Fab′, Fab′-SH, F(ab′)₂, linear antibodies, single domain antibody, single domain camelid antibody, single-chain antibody molecules (scFv), and diabodies capable of binding ligands or receptors associated with effector cells and antigens of diseased tissues or cells that are cancers, tumors, or other malignant tissues. In some embodiments, the bispecific antibody comprises a first binding domain with binding specificity to a target cell marker and a second binding domain with binding specificity to an effector cell antigen. In some embodiments, the first and the second binding domains can be non-antibody scaffolds such as anticalins, adnectins, fynomers, affilins, affibodies, centyrins, DARPins. In other embodiments, the binding domain for the tumor cell target is a variable domain of a T cell receptor that has been engineered to bind MHC that is loaded with a peptide fragment of a protein that is overexpressed by tumor cells. In some embodiments, the XPAT compositions are designed with considerations of the location of the target tissue protease as well as the presence of the same protease in healthy tissues not intended to be targeted, as well as the presence of the target ligand in healthy tissue but a greater presence of the ligand in unhealthy target tissue, in order to provide a wide therapeutic window. A “therapeutic window” refers to the largest difference between the minimal effective dose and the maximal tolerated dose for a given therapeutic composition. To help achieve a wide therapeutic window, the binding domains of the first portion of the compositions are shielded by the proximity of the bulking moiety (e.g., an XTEN polypeptide), wherein the binding affinity of the intact composition for one or both of the ligands is reduced compared to the composition that has been cleaved by a mammalian protease, thereby releasing the first portion from the shielding effects of the bulking moiety.

[0197] With respect to single chain binding domains, as is well established in the art Fv is the minimum antibody fragment which contains a complete antigen recognition and binding site, consisting of a dimer of one heavy (VH) and one light chain variable domain (VL) in non-covalent association. Within each VH and VL chain are three complementarity determining regions (CDRs) that interact to define an antigen binding site on the surface of the VH-VL dimer; the six CDRs of a binding domain confer antigen binding specificity to the antibody or single chain binding domain. In some cases, scFv are created in which each has 3, 4, or 5 CHRs within each binding domain. Framework sequences flanking the CDRs have a tertiary structure that is essentially conserved in native immunoglobulins across species, and the framework residues (FR) serve to hold the CDRs in their appropriate orientation. The constant domains are not required for binding function, but can aid in stabilizing VH-VL interaction. In some embodiments, the domain of the binding site of the polypeptide can be a pair of VH-VL, VH-VH or VL-VL domains either of the same or of different immunoglobulins, however it is generally preferred to make single chain binding domains using the respective VH and VL chains from the parental antibody. The order of VH and VL domains within the polypeptide chain is not limiting for the present invention; the order of domains given can be reversed usually without any loss of function, but it is understood that the VH and VL domains are arranged so that the antigen binding site can properly fold. Thus, the single chain binding domains of the bispecific scFv embodiments of the human or animal compositions can be in the order (VL-VH)¹—(VL-VH)², wherein “1” and “2” represent the first and second binding domains, respectively, or (VL-VH)¹—(VH-VL)², or (VH-VL)¹-(VL-VH)², or (VH-VL)¹-(VH-VL)², wherein the paired binding domains are linked by a polypeptide linker as described herein, below.

[0198] The arrangement of the binding domains in an exemplary bispecific single chain antibody disclosed herein can therefore be one in which the first binding domain is located C-terminally to the second binding domain. The arrangement of the V chains can be VH (target cell surface antigen)-VL(target cell surface antigen)-VL(effector cell antigen)-VH(effector cell antigen), VH(target cell surface antigen)-VL(target cell surface antigen)-VH(effector cell antigen)-VL(effector cell antigen), VL(target cell surface antigen)-VH(target cell surface antigen)-VL(effector cell antigen)-VH(effector cell antigen) or VL(target cell surface antigen)-VH(target cell surface antigen)-VH(effector cell antigen)-VL(effector cell antigen). For an arrangement, in which the second binding domain is located N-terminally to the first binding domain, the following orders are possible: VH (effector cell antigen)-VL(effector cell antigen)-VL(target cell surface antigen)-VH(target cell surface antigen), VH(effector cell antigen)-VL(effector cell antigen)-VH(target cell surface antigen)-VL(target cell surface antigen), VL(effector cell antigen)-VH(effector cell antigen)-VL(target cell surface antigen)-VH(target cell surface antigen) or VL(effector cell antigen)-VH(effector cell antigen)-VH(target cell surface antigen)-VL(target cell surface antigen). As used herein, “N-terminally to” or “C-terminally to” and grammatical variants thereof denote relative location within the primary amino acid sequence rather than placement at the absolute N- or C-terminus of the bispecific single chain antibody. Hence, as a non-limiting example, a first binding domain which is “located C-terminally to the second binding domain” denotes that the first binding is located on the carboxyl side of the second binding domain within the bispecific single chain antibody, and does not exclude the possibility that an additional sequence, for example a His-tag, or another compound such as a radioisotope, is located at the C-terminus of the bispecific single chain antibody.

[0199] In one embodiment, the chimeric polypeptide assembly compositions comprise a first portion comprising a first binding domain and a second binding domain wherein each of said binding domains is an scFv and wherein each scFv comprises one VL and one VH. In another embodiment, the chimeric polypeptide assembly compositions comprise a first portion comprising a first binding domain and a second binding domain wherein said binding domains are in a diabody configuration and wherein each domain comprises one VL domain and one VH. In the foregoing embodiments, the first domain has binding specificity to a tumor-specific marker or an antigen of a target cell and the second binding domain has binding specificity to an effector cell antigen. In one embodiment of the foregoing, the effector cell antigen is expressed on or within an effector cell. In one embodiment, the effector cell antigen is expressed on a T cell, such as a CD4+, CD8+, or natural killer (NK) cell. In another embodiment, the effector cell antigen is expressed on a B cell, master cell, dendritic cell, or myeloid cell. In one embodiment, the effector cell antigen is CD3, the cluster of differentiation 3 antigen of a cytotoxic T cell. In some embodiments of the foregoing, the first binding domain exhibits binding specificity to a tumor-specific marker associated with a tumor cell. In one embodiment, the binding domain has binding affinity to a tumor-specific marker wherein the tumor cell can include without limitation cells from stroma cell tumor, fibroblast tumor, myofibroblast tumor, glial cell tumor, epithelial cell tumor, fat cell tumor, immune cell tumor, vascular cell tumor, and smooth muscle cell tumor. In one embodiment, the tumor-specific marker or an antigen of a target cell can be alpha 4 integrin, Ang2, B7-H3, B7-H6, CEACAM5, cMET, CTLA4, FOLR1, EpCAM, CCR5, CD19, HER2, HER2 neu, HER3, HER4, HER1 (EGFR), PD-L1, PSMA, CEA, TROP-2, MUC1(mucin), MUC-2, MUC3, MUC4, MUC5AC, MUC5B, MUC7, MUC16 βhCG, Lewis-Y, CD20, CD33, CD38, CD30, CD56 (NCAM), CD133, ganglioside GD3; 9-O-Acetyl-GD3, GM2, Globo H, fucosyl GM1, GD2, carbonicanhydrase IX, CD44v6, Nectin-4, Sonic Hedgehog (Shh), Wue-1, plasma cell antigen 1, melanoma chondroitin sulfate proteoglycan (MCSP), CCR8, 6-transmembrane epithelial antigen of prostate (STEAP), mesothelin, A33 antigen, prostate stem cell antigen (PSCA), Ly-6, desmoglein 4, fetal acetylcholine receptor (fnAChR), CD25, cancer antigen 19-9 (CA19-9), cancer antigen 125 (CA-125), Muellerian inhibitory substance receptor type II (MISIIR), sialylated Tn antigen (s TN), fibroblast activation antigen (FAP), endosialin (CD248), epidermal growth factor receptor variant III (EGFRvIII), tumor-associated antigen L6 (TAL6), SAS, CD63, TAG72, Thomsen-Friedenreich antigen (TF-antigen), insulin-like growth factor I receptor (IGF-IR), Cora antigen, CD7, CD22, CD70, CD79a, CD79b, G250, MT-MMPs, F19 antigen, CA19-9, CA-125, alpha-fetoprotein (AFP), VEGFR1, VEGFR2, DLK1, SP17, ROR1, and EphA2. In one embodiment, the first binding domain that exhibits binding affinity to CD70 is its natural ligand, CD27 rather than an antibody fragment. In another embodiment, the first binding domain that exhibits binding affinity to B7-H6 is its natural ligand Nkp30 rather than an antibody fragment.

[0200] The scFv embodiments of the XPAT compositions of the invention comprise a first binding domain and a second binding domain wherein the VL and VH domains are derived from monoclonal antibodies with binding specificity to the tumor-specific marker or an antigen of a target cell and effector cell antigens, respectively. In other cases, the first and second binding domains each comprise six CDRs derived from monoclonal antibodies with binding specificity to a target cell marker, such as a tumor-specific marker and effector cell antigens, respectively. In other embodiments, the first and second binding domains of the first portion of the human or animal compositions can have 3, 4, or 5 CHRs within each binding domain. In other embodiments, the embodiments of the invention comprise a first binding domain and a second binding domain wherein each comprises a CDR-H1 region, a CDR-H2 region, a CDR-H3 region, a CDR-L1 region, a CDR-L2 region, and a CDR-H3 region, wherein each of said regions is derived from a monoclonal antibody capable of binding the tumor-specific marker or an antigen of a target cell, and effector cell antigens, respectively. In one embodiment, the invention provides a chimeric polypeptide assembly composition wherein the second binding domain comprises VH and VL regions derived from a monoclonal antibody capable of binding human CD3. In another embodiment, the invention provides a chimeric polypeptide assembly composition, wherein the scFv second binding domain comprises VH and VL regions wherein each VH and VL regions exhibit at least about 90%, or 91%, or 92%, or 93%, or 94%, or 95%, or 96%, or 97%, or 98%, or 99% identity to or is identical to paired VL and VH sequences of an anti-CD3 antibody set forth in Table 6a. In another aspect, the second domain embodiments of the invention comprise a CDR-H1 region, a CDR-H2 region, a CDR-H3 region, a CDR-L1 region, a CDR-L2 region, and a CDR-H3 region, wherein each of said regions is derived from a monoclonal antibody as set forth in Table 6a. In the foregoing embodiments, the VH and/or VL domains can be configured as scFv, diabodies, a single domain antibody, or a single domain camelid antibody.

[0201] In other embodiments, the second domains of the human or animal compositions are derived from an anti-CD3 antibody as set forth in Table 6a. In one embodiment of the foregoing, the second domain of the human or animal composition comprises the paired VL and the VH region sequences of the anti-CD3 antibody as set forth in Table 6a. In another embodiment, the invention provides a chimeric polypeptide assembly composition, wherein the second binding domain comprises VH and VL regions wherein each VH and VL regions exhibit at least about 90%, or 91%, or 92%, or 93%, or 94%, or 95%, or 96%, or 97%, or 98%, or 99% identity to or is identical to paired VL and VH sequences of the huUCHT1 anti-CD3 antibody of Table 6a. In the foregoing embodiments, the VH and/or VL domains can be configured as scFv, a portion of a diabody, a single domain antibody, or a single domain camelid antibody.

[0202] In other embodiments, the scFv of the first domain of the composition are derived from an anti-tumor cell antibody as set forth in Table 6f. In another embodiment, the invention provides a chimeric polypeptide assembly composition, wherein the first binding domain comprises VH and VL regions wherein each VH and VL regions exhibit at least about 90%, or 91%, or 92%, or 93%, or 94%, or 95%, or 96%, or 97%, or 98%, or 99% identity to or is identical to paired VL and VH sequences of an anti-tumor cell antibody as set forth in Table 6f. In one embodiment of the foregoing, the first domain of the recited compositions comprises the paired VL and the VH region sequences of an anti-tumor cell antibody disclosed herein. In the foregoing embodiments, the VH and/or VL domains can be configured as scFv, a portion of a diabody, a single domain antibody, or a single domain camelid antibody.

[0203] In another embodiment, the chimeric polypeptide assembly compositions comprise a first portion comprising a first binding domain and a second binding domain wherein said binding domains are in a diabody configuration and each of said binding domains comprises one VL domain and one VH domain. In one embodiment, the diabody embodiments of the invention comprise a first binding domain and a second binding domain wherein the VL and VH domains are derived from monoclonal antibodies with binding specificity to a tumor-specific marker or an antigen of a target cell, and the effector cell antigen, respectively. In another embodiment, the diabody embodiments of the invention comprise a first binding domain and a second binding domain wherein each comprises a CDR-H1 region, a CDR-H2 region, a CDR-H3 region, a CDR-L1 region, a CDR-L2 region, and a CDR-H3 region, wherein each of said regions is derived from a monoclonal antibody capable of binding the tumor-specific marker or target cell antigen, and the effector cell antigen, respectively. It is envisaged that the diabody embodiments of the invention comprise a first binding domain and a second binding domain wherein the VL and VH domains are derived from monoclonal antibodies with binding specificity to the tumor-specific marker or target cell antigen, and the effector cell antigen, respectively. In another aspect, the diabody embodiments of the invention comprise a first binding domain and a second binding domain wherein each comprises a CDR-H1 region, a CDR-H2 region, a CDR-H3 region, a CDR-L1 region, a CDR-L2 region, and a CDR-H3 region, wherein each of said regions is derived from a monoclonal antibody capable of binding the tumor-specific marker or target cell antigen, and the effector cell antigen, respectively. In one embodiment, the invention provides a chimeric polypeptide assembly composition wherein the diabody second binding domain comprises the paired VH and VL regions derived from a monoclonal antibody capable of binding human CD3. In another embodiment, the invention provides a chimeric polypeptide assembly composition, wherein the diabody second binding domain comprises VH and VL regions wherein each VH and VL regions exhibit at least about 90%, or 91%, or 92%, or 93%, or 94%, or 95%, or 96%, or 97%, or 98%, or 99% identity to or is identical to paired VL and VH sequences of an anti-CD3 antibody as set forth in Table 6a. In another embodiment, the invention provides a chimeric polypeptide assembly composition, wherein the diabody second binding domain comprises VH and VL regions wherein each VH and VL regions exhibit at least about 90%, or 91%, or 92%, or 93%, or 94%, or 95%, or 96%, or 97%, or 98%, or 99% identity to or is identical to the VL and a VH sequence of the huUCHT1 antibody as set forth in Table 6a. In other embodiments, the diabody second domain of the composition is derived from an anti-CD3 antibody described herein. In another embodiment, the invention provides a chimeric polypeptide assembly composition, wherein the diabody first binding domain comprises VH and VL regions wherein each VH and VL regions exhibit at least about 90%, or 91%, or 92%, or 93%, or 94%, or 95%, or 96%, or 97%, or 98%, or 99% identity to or is identical to VL and VH sequences of an anti-tumor cell antibody as set forth in Table 6f. In other embodiments, the diabody first domain of the composition is derived from an anti-tumor cell antibody described herein.

[0204] Therapeutic monoclonal antibodies from which VL and VH and CDR domains can be derived for the human or animal compositions are known in the art. The sequences for the above antibodies can be obtained from publicly available databases, patents, or literature references. In addition, non-limiting examples of monoclonal antibodies and VH and VL sequences from anti-CD3 antibodies set forth in Table 6a and non-limiting examples of monoclonal antibodies and VH and VL sequences to cancer, tumor, or target cell markers set forth in Table 6f.

### Anti-CD3 Binding Domains

[0205] In some embodiments, the invention provides chimeric polypeptide assembly compositions comprising a binding domain of the first portion with binding affinity to T cells. In one embodiment, the binding domain of the second portion comprises VL and VH derived from a monoclonal antibody to an antigen of the CD3. In another embodiment, the binding domain comprises VL and VH derived from a monoclonal antibody to CD3epsilon and CD3delta. Monoclonal antibodies to CD3 neu are known in the art. Exemplary, non-limiting examples of VL and VH sequences of monoclonal antibodies to CD3 are set forth in Table 6a. In one embodiment, the invention provides a chimeric polypeptide assembly comprising a binding domain with binding affinity to CD3 comprising anti-CD3 VL and VH sequences set forth in Table 6a. In another embodiment, the invention provides a chimeric polypeptide assembly comprising a binding domain of the first portion with binding affinity to CD3epsilon comprising anti-CD3epsilon VL and VH sequences set forth in Table 6a. In another embodiment, the invention provides a chimeric polypeptide assembly composition, wherein the scFv second binding domain of the first portion comprises VH and VL regions wherein each VH and VL regions exhibit at least about 90%, or 91%, or 92%, or 93%, or 94%, or 95%, or 96%, or 97%, or 98%, or 99% identity to or is identical to paired VL and VH sequences of the huUCHT1 anti-CD3 antibody of Table 6a. In another embodiment, the invention provides a chimeric polypeptide assembly composition comprising a binding domain with binding affinity to CD3 comprising the CDR-L1 region, the CDR-L2 region, the CDR-L3 region, the CDR-H1 region, the CDR-H2 region, and the CDR-H3 region, wherein each is derived from the respective anti-CD3 VL and VH sequences set forth in Table 6a. In another embodiment, the invention provides a chimeric polypeptide assembly composition comprising a binding domain with binding affinity to CD3 comprising the CDR-L1 region, the CDR-L2 region, the CDR-L3 region, the CDR-H1 region, the CDR-H2 region, and the CDR-H3 region, wherein the CDR sequences are RASQDIRNYLN (SEQ ID NO: 8034), YTSRLES (SEQ ID NO: 8035), QQGNTLPWT (SEQ ID NO: 8036), GYSFTGYTMN (SEQ ID NO: 8037), LINPYKGVST (SEQ ID NO: 8038), and SGYYGDSDWYFDV (SEQ ID NO: 8039)

[0206] The CD3 complex is a group of cell surface molecules that associates with the T-cell antigen receptor (TCR) and functions in the cell surface expression of TCR and in the signaling transduction cascade that originates when apeptide:MHC ligand binds to the TCR. Typically, when an antigen binds to the T-cell receptor, the CD3 sends signals through the cell membrane to the cytoplasm inside the T cell. This causes activation of the T cell that rapidly divide to produce new T cells sensitized to attack the particular antigen to which the TCR were exposed. The CD3 complex is comprised of the CD3epsilon molecule, along with four other membrane-bound polypeptides (CD3-gamma, -delta, -zeta, and -beta). In humans, CD3-epsilon is encoded by the CD3E gene on Chromosome 11. The intracellular domains of each of the CD3 chains contain immunoreceptor tyrosine-based activation motifs (ITAMs) that serve as the nucleating point for the intracellular signal transduction machinery upon T cell receptor engagement.

[0207] A number of therapeutic strategies modulate T cell immunity by targeting TCR signaling, particularly the anti-human CD3 monoclonal antibodies (mAbs) that are widely used clinically in immunosuppressive regimes. The CD3-specific mouse mAb OKT3 was the first mAb licensed for use in humans (Sgro, C. Side-effects of a monoclonal antibody, muromonab CD3/orthoclone OKT3: bibliographic review. Toxicology 105:23-29, 1995) and is widely used clinically as an immunosuppressive agent in transplantation (Chatenoud, Clin. Transplant 7:422-430, (1993); Chatenoud, Nat. Rev. Immunol. 3:123-132 (2003); Kumar, Transplant. Proc. 30:1351-1352 (1998)), type 1 diabetes, and psoriasis. Importantly, anti-CD3 mAbs can induce partial T cell signaling and clonal anergy (Smith, J A, Nonmitogenic Anti-CD3 Monoclonal Antibodies Deliver a Partial T Cell Receptor Signal and Induce Clonal Anergy J. Exp. Med. 185:1413-1422 (1997)). OKT3 has been described in the literature as a T cell mitogen as well as a potent T cell killer (Wong, JT. The mechanism of anti-CD3 monoclonal antibodies. Mediation of cytolysis by inter-T cell bridging. Transplantation 50:683-689 (1990)). In particular, the studies of Wong demonstrated that by bridging CD3 T cells and target cells, one could achieve killing of the target and that neither FcR-mediated ADCC nor complement fixation was necessary for bivalent anti-CD3 MAB to lyse the target cells.

[0208] OKT3 exhibits both a mitogenic and T-cell killing activity in a time-dependent fashion; following early activation of T cells leading to cytokine release, upon further administration OKT3 later blocks all known T-cell functions. It is due to this later blocking of T cell function that OKT3 has found such wide application as an immunosuppressant in therapy regimens for reduction or even abolition of allograft tissue rejection. Other antibodies specific for the CD3 molecule are disclosed in Tunnacliffe, Int. Immunol. 1 (1989), 546-50, WO2005/118635 and WO2007/033230 describe anti-human monoclonal CD3 epsilon antibodies, U.S. Pat. No. 5,821,337 describes the VL and VH sequences of murine anti-CD3 monoclonal Ab UCHTI (muxCD3, Shalaby et al., J. Exp. Med. 175, 217-225 (1992) and a humanized variant of this antibody (hu UCHTI), and United States Patent Application 20120034228 discloses binding domains capable of binding to an epitope of human and non-chimpanzee primate CD3 epsilon chain.

TABLE 6a
Anti-CD3 Monoclonal Antibodies and Sequences

| | | | | SEQ ID | SEQ ID | | SEQ ID | SEQ |
|---|---|---|---|---|---|---|---|---|
| Clone | Antibody | | VH | NO: (full | NO: | VL | NO: (full | ID NO: |
| Name | Name | Target | Sequence | length) | (CDRs) | Sequence | length) | (CDRs) |
| huOKT3 | | CD3 | QVQLVQSGGGV | 8040 | 8900, | DIQMTQSPSSL | 8049 | 8908, |
| | | | VQPGRSLRLSCK | | 8901, | SASVGDRVTI | | 8909, |
| | | | ASGYTFTRYTM | | 8902 | TCSASSSVSY | | 8910 |
| | | | HWVRQAPGKGL | | | MNWYQQTPG | | |
| | | | EWIGYINPSRGY | | | KAPKRWIYDT | | |
| | | | TNYNQKVKDRF | | | SKLASGVPSR | | |
| | | | TISRDNSKNTAFL | | | FSGSGSGTDY | | |
| | | | QMDSLRPEDTGV | | | TFTISSLQPEDI | | |
| | | | YFCARYYDDHY | | | ATYYCQQWS | | |
| | | | CLDYWGQGTPV | | | SNPFTFGQGT | | |
| | | | TVSS | | | KLQITR | | |
| huUCHT1 | | CD3 | EVQLVESGGGLV | 8041 | 8037, | DIQMTQSPSSL | 8050 | 8034, |
| | | | QPGGSLRLSCAA | | 8038, | SASVGDRVTI | | 8035, |
| | | | SGYSFTGYTMN | | 8039 | TCRASQDIRN | | 8036 |
| | | | WVRQAPGKGLE | | | YLNWYQQKP | | |
| | | | WVALINPYKGV | | | GKAPKLLIYY | | |
| | | | STYNQKFKDRFTI | | | TSRLESGVPS | | |
| | | | SVDKSKNTAYLQ | | | RFSGSGSGTD | | |
| | | | MNSLRAEDTAVY | | | YTLTISSLQPE | | |
| | | | YCARSGYYGDS | | | DFATYYCQQ | | |
| | | | DWYFDVWGQGT | | | GNTLPWTFG | | |
| | | | LVTVSS | | | QGTKVEIK | | |
| hu12F6 | | CD3 | QVQLVQSGGGV | 8042 | 8903, | DIQMTQSPSSL | 8051 | 8911, |
| | | | VQPGRSLRLSCK | | 8904, | SASVGDRVT | | 8912, |
| | | | ASGYTFTSYTM | | 8905 | MTCRASSSVS | | 8913 |
| | | | HWVRQAPGKGL | | | YMHWYQQTP | | |
| | | | EWIGYINPSSGY | | | GKAPKPWIYA | | |
| | | | TKYNQKFKDRF | | | TSNLASGVPS | | |
| | | | TISADKSKSTAFL | | | RFSGSGSGTD | | |
| | | | QMDSLRPEDTGV | | | YTLTISSLQPE | | |
| | | | YFCARWQDYDV | | | DIATYYCQQ | | |
| | | | YFDYWGQGTPV | | | WSSNPPTFGQ | | |
| | | | TVSS | | | GTKLQITR | | |
| mOKT3 | | CD3 | QVQLQQSGAELA | 8043 | 8900, | QIVLTQSPAIM | 8052 | 8908, |
| | | | RPGASVKMSCKA | | 8906, | SASPGEKVTM | | 8909, |
| | | | SGYTFTRYTMH | | 8902 | TCSASSSVSY | | 8910 |
| | | | WVKQRPGQGLE | | | MNWYQQKSG | | |
| | | | WIGYINPSRGYT | | | TSPKRWIYDT | | |
| | | | NYNQKFKDKAT | | | SKLASGVPAH | | |
| | | | LTTDKSSSTAYM | | | FRGSGSGTSY | | |
| | | | QLSSLTSEDSAVY | | | SLTISGMEAE | | |
| | | | YCARYYDDHYC | | | DAATYYCQQ | | |
| | | | LDYWGQGTTLT | | | WSSNPFTFGS | | |
| | | | VSS | | | GTKLEINR | | |
| MT103 | blin- | CD3 | DIKLQQSGAELA | 8044 | 8900, | DIQLTQSPAIM | 8053 | 8914, |
| | atumomab | | RPGASVKMSCKT | | 8906, | SASPGEKVTM | | 8915, |
| | | | SGYTFTRYTMH | | 8902 | TCRASSSVSY | | 8916 |
| | | | WVKQRPGQGLE | | | MNWYQQKSG | | |
| | | | WIGYINPSRGYT | | | TSPKRWIYDT | | |
| | | | NYNQKFKDKAT | | | SKVASGVPYR | | |
| | | | LTTDKSSSTAYM | | | FSGSGSGTSYS | | |
| | | | QLSSLTSEDSAVY | | | LTISSMEAED | | |
| | | | YCARYYDDHYC | | | AATYYCQQW | | |
| | | | LDYWGQGTTLT | | | SSNPLTFGAG | | |
| | | | VSS | | | TKLELK | | |
| MT110 | solitomab | CD3 | DVQLVQSGAEVK | 8045 | 8900, | DIVLTQSPATL | 8054 | 8917, |
| | | | KPGASVKVSCKA | | 8907, | SLSPGERATLS | | 8915, |
| | | | SGYTFTRYTMH | | 8902 | CRASQSVSY | | 8916 |
| | | | WVRQAPGQGLE | | | MNWYQQKPG | | |
| | | | WIGYINPSRGYT | | | KAPKRWIYDT | | |
| | | | NYADSVKGRFTI | | | SKVASGVPAR | | |
| | | | TTDKSTSTAYME | | | FSGSGSGTDY | | |
| | | | LSSLRSEDTATYY | | | SLTINSLEAED | | |
| | | | CARYYDDHYCL | | | AATYYCQQW | | |
| | | | DYWGQGTTVTV | | | SSNPLTFGGG | | |
| | | | SS | | | TKVEIK | | |
| CD3.7 | | CD3 | EVQLVESGGGLV | 8046 | | QTVVTQEPSL | 8055 | |
| | | | QPGGSLKLSCAA | | | TVSPGGTVTL | | |
| | | | SGFTFNKYAMN | | | TCGSSTGAVT | | |
| | | | WVRQAPGKGLE | | | SGYYPNWVQ | | |
| | | | WVARIRSKYNNY | | | QKPGQAPRGL | | |
| | | | ATYYADSVKDRF | | | IGGTKFLAPG | | |
| | | | TISRDDSKNTAYL | | | TPARFSGSLL | | |
| | | | QMNNLKTEDTA | | | GGKAALTLSG | | |
| | | | VYYCVRHGNFG | | | VQPEDEAEYY | | |
| | | | NSYISYWAYWG | | | CALWYSNRW | | |
| | | | QGTLVTVSS | | | VFGGGTKLTV | | |
| | | | | | | L | | |
| CD3.8 | | CD3 | EVQLVESGGGLV | 8047 | | QAVVTQEPSL | 8056 | |
| | | | QPGGSLRLSCAA | | | TVSPGGTVTL | | |
| | | | SGFTFNTYAMN | | | TCGSSTGAVT | | |
| | | | WVRQAPGKGLE | | | TSNYANWVQ | | |
| | | | WVGRIRSKYNNY | | | QKPGQAPRGL | | |
| | | | ATYYADSVKGRF | | | IGGTNKRAPG | | |
| | | | TISRDDSKNTLYL | | | VPARFSGSLL | | |
| | | | QMNSLRAEDTAV | | | GGKAALTLSG | | |
| | | | YYCVRHGNFGNS | | | AQPEDEAEYY | | |
| | | | YVSWFAYWGQG | | | CALWYSNLW | | |
| | | | TLVTVSS | | | VFGGGTKLTV | | |
| | | | | | | L | | |
| CD3.9 | | CD3 | EVQLLESGGGLV | 773 | | ELVVTQEPSL | 772 | |
| | | | QPGGSLKLSCAA | | | TVSPGGTVTL | | |
| | | | SGFTFNTYAMN | | | TCRSSTGAVT | | |
| | | | WVRQAPGKGLE | | | TSNYANWVQ | | |
| | | | WVARIRSKYNNY | | | QKPGQAPRGL | | |
| | | | ATYYADSVKDRF | | | IGGTNKRAPG | | |
| | | | TISRDDSKNTAYL | | | TPARFSGSLL | | |
| | | | QMNNLKTEDTA | | | GGKAALTLSG | | |
| | | | VYYCVRHGNFG | | | VQPEDEAEYY | | |
| | | | NSYVSWFAYWG | | | CALWYSNLW | | |
| | | | QGTLVTVSS | | | VFGGGTKLTV | | |
| | | | | | | L | | |
| CD3.10 | | CD3 | EVKLLESGGGLV | 8048 | | QAVVTQESAL | 8057 | |
| | | | QPKGSLKLSCAA | | | TTSPGETVTLT | | |
| | | | SGFTFNTYAMN | | | CRSSTGAVTT | | |
| | | | WVRQAPGKGLE | | | SNYANWVQE | | |
| | | | WVARIRSKYNNY | | | KPDHLFTGLI | | |
| | | | ATYYADSVKDRF | | | GGTNKRAPG | | |
| | | | TISRDDSQSILYL | | | VPARFSGSLIG | | |
| | | | QMNNLKTEDTA | | | DKAALTITGA | | |
| | | | MYYCVRHGNFG | | | QTEDEAIYFC | | |
| | | | NSYVSWFAYWG | | | ALWYSNLWV | | |
| | | | QGTLVTVSS | | | FGGGTKLTVL | | |

*underlined sequences, if present, are CDRs within the VL and VH

### CD3 Cell Antigen Binding Fragments

[0209] In another aspect, the disclosure relates to antigen binding fragments (AF2) having specific binding affinity for an effector cell antigen that can be incorporated into any of the human or animal composition embodiments described herein. In some cases, the effector cell antigen is expressed on the surface of an effector cell selected from a plasma cell, a T cell, a B cell, a cytokine induced killer cell (CIK cell), a mast cell, a dendritic cell, a regulatory T cell (RegT cell), a helper T cell, a myeloid cell, and a NK cell.

[0210] Various AF2 that bind effector cell antigens have particular utility for pairing with an antigen binding fragment with binding affinity to EGFR antigens associated with a diseased cell or tissue in composition formats in order to effect cell killing of the diseased cell or tissue. Binding specificity can be determined by complementarity determining regions, or CDRs, such as light chain CDRs or heavy chain CDRs. In many cases, binding specificity is determined by light chain CDRs and heavy chain CDRs. A given combination of heavy chain CDRs and light chain CDRs provides a given binding pocket that confers greater affinity and/or specificity towards an effector cell antigen as compared to other reference antigens. The resulting bispecific compositions, having a first antigen binding fragment (AF1) to EGFR linked by a short, flexible peptide linker to a second antigen binding fragment (AF2) with binding specificity to an effector cell antigen are bispecific, with each antigen binding fragment having specific binding affinity to their respective ligands. The skilled worker will understand that in such compositions, an AF1 directed against an EGFR of a disease tissue is used in combination with a AF2 directed towards an effector cell marker in order to bring an effector cell in close proximity to the cell of a disease tissue in order to effect the cytolysis of the cell of the diseased tissue. Further, the AF1 and AF2 are incorporated into the specifically designed polypeptides comprising cleavable release segments and XTEN in order to confer prodrug characteristics on the compositions that becomes activated by release of the fused AF1 and AF2 upon the cleavage of the release segments when in proximity to the disease tissue having proteases capable of cleaving the release segments in one or more locations in the release segment sequence.

[0211] In one embodiment, the AF2 of the human or animal compositions has binding affinity for an effector cell antigen expressed on the surface of a T cell. In another embodiment, the AF2 of the human or animal compositions has binding affinity for CD3. In another embodiment, the AF2 of the human or animal compositions has binding affinity for a member of the CD3 complex, which includes in individual form or independently combined form all known CD3 subunits of the CD3 complex; for example, CD3 epsilon, CD3 delta, CD3 gamma, CD3 zeta, CD3 alpha and CD3 beta. In another embodiment, the AF2 has binding affinity for CD3 epsilon, CD3 delta, CD3 gamma, CD3 zeta, CD3 alpha or CD3 beta.

[0212] The origin of the antigen binding fragments contemplated by the disclosure can be derived from a naturally occurring antibody or fragment thereof, a non-naturally occurring antibody or fragment thereof, a humanized antibody or fragment thereof, a synthetic antibody or fragment thereof, a hybrid antibody or fragment thereof, or an engineered antibody or fragment thereof. Methods for generating an antibody for a given target marker are well known in the art. For example, the monoclonal antibodies can be made using the hybridoma method first described by Kohler et al., Nature, 256:495 (1975), or can be made by recombinant DNA methods (U.S. Pat. No. 4,816,567). The structure of antibodies and fragments thereof, variable regions of heavy and light chains of an antibody (VH and VL), single chain variable regions (scFv), complementarity determining regions (CDR), and domain antibodies (dAbs) are well understood. Methods for generating a polypeptide having a desired antigen binding fragment with binding affinity to a given antigen are known in the art.

[0213] The skilled worker will understand that use of the term “antigen binding fragments” for the composition embodiments disclosed herein is intended to include portions or fragments of antibodies that retain the ability to bind the antigens that are the ligands of the corresponding intact antibody. In such embodiments, the antigen binding fragment can be, but is not limited to, CDRs and intervening framework regions, variable or hypervariable regions of light and/or heavy chains of an antibody (VL, VH), variable fragments (Fv), Fab′ fragments, F(ab′)2 fragments, Fab fragments, single chain antibodies (scAb), VHH camelid antibodies, single chain variable fragment (scFv), linear antibodies, a single domain antibody, complementarity determining regions (CDR), domain antibodies (dAbs), single domain heavy chain immunoglobulins of the BHH or BNAR type, single domain light chain immunoglobulins, or other polypeptides known in the art containing a fragment of an antibody capable of binding an antigen. The antigen binding fragments having CDR-H and CDR-L can be configured in a (CDR-H)-(CDR-L) or a (CDR-H)-(CDR-L) orientation, N-terminus to C-terminus. The VL and VH of two antigen binding fragments can also be configured in a single chain diabody configuration; i.e., the VL and VH of the AF1 and AF2 configured with linkers of an appropriate length to permit arrangement as a diabody.

[0214] Various CD3 binding AF2 of the disclosure have been specifically modified to enhance their stability in the polypeptide embodiments described herein. Protein aggregation of antibodies continues to be a significant problem in their developability and remains a major area of focus in antibody production. Antibody aggregation can be triggered by partial unfolding of its domains, leading to monomer-monomer association followed by nucleation and aggregate growth. Although the aggregation propensities of antibodies and antibody-based proteins can be affected by the external experimental conditions, they are strongly dependent on the intrinsic antibody properties as determined by their sequences and structures. Although it is well known that proteins are only marginally stable in their folded states, it is often less well appreciated that most proteins are inherently aggregation-prone in their unfolded or partially unfolded states, and the resulting aggregates can be extremely stable and long-lived. Reduction in aggregation propensity has also been shown to be accompanied by an increase in expression titer, showing that reducing protein aggregation is beneficial throughout the development process and can lead to a more efficient path to clinical studies. For therapeutic proteins, aggregates are a significant risk factor for deleterious immune responses in patients, and can form via a variety of mechanisms. Controlling aggregation can improve protein stability, manufacturability, attrition rates, safety, formulation, titers, immunogenicity, and solubility. The intrinsic properties of proteins such as size, hydrophobicity, electrostatics and charge distribution play important roles in protein solubility. Low solubility of therapeutic proteins due to surface hydrophobicity has been shown to render formulation development more difficult and can lead to poor bio-distribution, undesirable pharmacokinetics behavior and immunogenicity in vivo. Decreasing the overall surface hydrophobicity of candidate monoclonal antibodies can also provide benefits and cost savings relating to purification and dosing regimens. Individual amino acids can be identified by structural analysis as being contributory to aggregation potential in an antibody, and can be located in CDR as well as framework regions. In particular, residues can be predicted to be at high risk of causing hydrophobicity issues in a given antibody. In one embodiment, the present disclosure provides an AF2 having the capability to specifically bind CD3 in which the AF2 has at least one amino acid substitution of a hydrophobic amino acid in a framework region relative to the parental antibody or antibody fragment wherein the hydrophobic amino acid is selected from isoleucine, leucine or methionine. In another embodiment, the CD3 AF2 has at least two amino acid substitutions of hydrophobic amino acids in one or more framework regions wherein the hydrophobic amino acids are selected from isoleucine, leucine or methionine.

[0215] Changes on a polypeptide's net electrical charge, in particularly with regard to the antibodies or antibody fragments comprising particular embodiments of the invention set forth herein, were taken into account in the design of the sequences of the AF2 of the embodiments described herein, wherein individual amino acid substitutions were made relative to the parental antibody utilized as the starting point. Relevant to these design considerations is the polypeptide's isoelectric point (pI), which is the pH at which the antibody or antibody fragment has no net electrical charge. An antibody or antibody fragment typically has a net positive charge which tends to correlate with increased blood clearance and tissue retention, with a generally shorter half-life, whereas a net negative charge results in decreased tissue uptake and a longer half-life. It is possible to manipulate this charge through mutations to the framework residues. The isoelectric point of a polypeptide can be determined mathematically (e.g., computationally) or experimentally by an in vitro assay. In some embodiments, the isoelectric points of the AF1 and AF2 are designed to be within a particular range of each other, thereby promoting stability.

[0216] In one embodiment, the present disclosure provides an AF2 for use in any of the polypeptide embodiments described herein comprising CDR-L and CDR-H, wherein the AF2 (a) specifically binds to cluster of differentiation 3 T cell receptor (CD3); and (b) comprises CDR-H1, CDR-H2, and CDR-H3, having amino acid sequences of SEQ ID NOS: 742, 743, and 744, respectively. In another embodiment, the present disclosure provides an AF2 for use in any of the polypeptide embodiments described herein comprising CDR-L and CDR-H, wherein the AF2 (a) specifically binds to cluster of differentiation 3 T cell receptor (CD3); (b) comprises CDR-H1, CDR-H2, and CDR-H3, having amino acid sequences of SEQ ID NOS: 742, 743, and 744, respectively; and (c) comprises CDR-L wherein the CDR-L comprises a CDR-L1 having an amino acid sequence of SEQ ID NOS: 735 or 736, a CDR-L2 having an amino acid sequence of SEQ ID NOS: 738 or 739, and a CDR-L3 having an amino acid sequence of SEQ ID NO:740. In another embodiment, the foregoing AF2 embodiments of the paragraph further comprises light chain framework regions (FR-L) and heavy chain framework regions (FR-H) wherein AF2 comprises a FR-L1 exhibiting at least 86%, 87%, 88%, 89%, 90%, 91%, 92%, 93%, 94%, 95%, 96%, 97%, 98%, 99% sequence identity or is identical to the amino acid sequence of SEQ ID NO:746, a FR-L2 exhibiting at least 86%, 87%, 88%, 89%, 90%, 91%, 92%, 93%, 94%, 95%, 96%, 97%, 98%, 99% sequence identity or is identical to the amino acid sequence of SEQ ID NO:747, a FR-L3 exhibiting at least 86%, 87%, 88%, 89%, 90%, 91%, 92%, 93%, 94%, 95%, 96%, 97%, 98%, 99% sequence identity or is identical to the amino acid sequence of any one of SEQ ID NOS:748-751, a FR-L4 exhibiting at least 86%, 87%, 88%, 89%, 90%, 91%, 92%, 93%, 94%, 95%, 96%, 97%, 98%, 99% sequence identity or is identical to the amino acid sequence of SEQ ID NO:754, a FR-H1 exhibiting at least 86%, 87%, 88%, 89%, 90%, 91%, 92%, 93%, 94%, 95%, 96%, 97%, 98%, 99% sequence identity or is identical to the amino acid sequence of SEQ ID NO:755 or SEQ ID NO:756, a FR-H2 exhibiting at least 86%, 87%, 88%, 89%, 90%, 91%, 92%, 93%, 94%, 95%, 96%, 97%, 98%, 99% sequence identity or is identical to the amino acid sequence of SEQ ID NO:759, a FR-H3 exhibiting at least 86%, 87%, 88%, 89%, 90%, 91%, 92%, 93%, 94%, 95%, 96%, 97%, 98%, 99% sequence identity or is identical to the amino acid sequence of SEQ ID NO:760; and a FR-H4 exhibiting at least 86%, 87%, 88%, 89%, 90%, 91%, 92%, 93%, 94%, 95%, 96%, 97%, 98%, 99% sequence identity or is identical to the amino acid sequence of SEQ ID NO:764. In another embodiment, the AF2 for use in any of the polypeptide embodiments described herein comprises light chain framework regions (FR-L) and heavy chain framework regions (FR-H) wherein AF2 comprises a FR-L1 exhibiting at least 86%, 87%, 88%, 89%, 90%, 91%, 92%, 93%, 94%, 95%, 96%, 97%, 98%, 99% sequence identity or is identical to the amino acid sequence of SEQ ID NO:746, a FR-L2 exhibiting at least 86%, 87%, 88%, 89%, 90%, 91%, 92%, 93%, 94%, 95%, 96%, 97%, 98%, 99% sequence identity or is identical to the amino acid sequence of SEQ ID NO:747, a FR-L3 exhibiting at least 86%, 87%, 88%, 89%, 90%, 91%, 92%, 93%, 94%, 95%, 96%, 97%, 98%, 99% sequence identity or is identical to the amino acid sequence of SEQ ID NO:748, FR-L4 exhibiting at least 86%, 87%, 88%, 89%, 90%, 91%, 92%, 93%, 94%, 95%, 96%, 97%, 98%, 99% sequence identity or is identical to the amino acid sequence of SEQ ID NO:754, a FR-H1 exhibiting at least 86%, 87%, 88%, 89%, 90%, 91%, 92%, 93%, 94%, 95%, 96%, 97%, 98%, 99% sequence identity or is identical to the amino acid sequence of SEQ ID NO:755, a FR-H2 exhibiting at least 86%, 87%, 88%, 89%, 90%, 91%, 92%, 93%, 94%, 95%, 96%, 97%, 98%, 99% sequence identity or is identical to the amino acid sequence of SEQ ID NO:759, a FR-H3 exhibiting at least 86%, 87%, 88%, 89%, 90%, 91%, 92%, 93%, 94%, 95%, 96%, 97%, 98%, 99% sequence identity or is identical to the amino acid sequence of SEQ ID NO:760; and a FR-H4 exhibiting at least 86%, 87%, 88%, 89%, 90%, 91%, 92%, 93%, 94%, 95%, 96%, 97%, 98%, 99% sequence identity or is identical to the amino acid sequence of SEQ ID NO:764. In another embodiment, the AF2 for use in any of the polypeptide embodiments described herein comprises light chain framework regions (FR-L) and heavy chain framework regions (FR-H) wherein AF2 comprises a FR-L1 exhibiting at least 86%, 87%, 88%, 89%, 90%, 91%, 92%, 93%, 94%, 95%, 96%, 97%, 98%, 99% sequence identity or is identical to the amino acid sequence of SEQ ID NO:746, a FR-L2 exhibiting at least 86%, 87%, 88%, 89%, 90%, 91%, 92%, 93%, 94%, 95%, 96%, 97%, 98%, 99% sequence identity or is identical to the amino acid sequence of SEQ ID NO:747, a FR-L3 exhibiting at least 86%, 87%, 88%, 89%, 90%, 91%, 92%, 93%, 94%, 95%, 96%, 97%, 98%, 99% sequence identity or is identical to the amino acid sequence of SEQ ID NO:749, a FR-L4 exhibiting at least 86%, 87%, 88%, 89%, 90%, 91%, 92%, 93%, 94%, 95%, 96%, 97%, 98%, 99% sequence identity or is identical to the amino acid sequence of SEQ ID NO:754, a FR-H1 exhibiting at least 86%, 87%, 88%, 89%, 90%, 91%, 92%, 93%, 94%, 95%, 96%, 97%, 98%, 99% sequence identity or is identical to the amino acid sequence of SEQ ID NO:755, a FR-H2 exhibiting at least 86%, 87%, 88%, 89%, 90%, 91%, 92%, 93%, 94%, 95%, 96%, 97%, 98%, 99% sequence identity or is identical to the amino acid sequence of SEQ ID NO:759, a FR-H3 exhibiting at least 86%, 87%, 88%, 89%, 90%, 91%, 92%, 93%, 94%, 95%, 96%, 97%, 98%, 99% sequence identity or is identical to the amino acid sequence of SEQ ID NO:760; and a FR-H4 exhibiting at least 86%, 87%, 88%, 89%, 90%, 91%, 92%, 93%, 94%, 95%, 96%, 97%, 98%, 99% sequence identity or is identical to the amino acid sequence of SEQ ID NO:764. In another embodiment, the AF2 of the human or animal polypeptide embodiments described herein comprises light chain framework regions (FR-L) and heavy chain framework regions (FR-H) wherein AF2 comprises a FR-L1 exhibiting at least 86%, 87%, 88%, 89%, 90%, 91%, 92%, 93%, 94%, 95%, 96%, 97%, 98%, 99% sequence identity or is identical to the amino acid sequence of SEQ ID NO:746, a FR-L2 exhibiting at least 86%, 87%, 88%, 89%, 90%, 91%, 92%, 93%, 94%, 95%, 96%, 97%, 98%, 99% sequence identity or is identical to the amino acid sequence of SEQ ID NO:747, a FR-L3 exhibiting at least 86%, 87%, 88%, 89%, 90%, 91%, 92%, 93%, 94%, 95%, 96%, 97%, 98%, 99% sequence identity or is identical to the amino acid sequence of SEQ ID NO:750, a FR-L4 exhibiting at least 86%, 87%, 88%, 89%, 90%, 91%, 92%, 93%, 94%, 95%, 96%, 97%, 98%, 99% sequence identity or is identical to the amino acid sequence of SEQ ID NO:754, a FR-H1 exhibiting at least 86%, 87%, 88%, 89%, 90%, 91%, 92%, 93%, 94%, 95%, 96%, 97%, 98%, 99% sequence identity or is identical to the amino acid sequence of SEQ ID NO:755, a FR-H2 exhibiting at least 86%, 87%, 88%, 89%, 90%, 91%, 92%, 93%, 94%, 95%, 96%, 97%, 98%, 99% sequence identity or is identical to the amino acid sequence of SEQ ID NO:759, a FR-H3 exhibiting at least 86%, 87%, 88%, 89%, 90%, 91%, 92%, 93%, 94%, 95%, 96%, 97%, 98%, 99% sequence identity or is identical to the amino acid sequence of SEQ ID NO:760, and a FR-H4 exhibiting at least 86%, 87%, 88%, 89%, 90%, 91%, 92%, 93%, 94%, 95%, 96%, 97%, 98%, 99% sequence identity or is identical to the amino acid sequence of SEQ ID NO:764. In another embodiment, the AF2 of the human or animal polypeptide embodiments described herein comprises light chain framework regions (FR-L) and heavy chain framework regions (FR-H) wherein AF2 comprises a FR-L1 exhibiting at least 86%, 87%, 88%, 89%, 90%, 91%, 92%, 93%, 94%, 95%, 96%, 97%, 98%, 99% sequence identity or is identical to the amino acid sequence of SEQ ID NO:746, a FR-L2 exhibiting at least 86%, 87%, 88%, 89%, 90%, 91%, 92%, 93%, 94%, 95%, 96%, 97%, 98%, 99% sequence identity or is identical to the amino acid sequence of SEQ ID NO:747, a FR-L3 exhibiting at least 86%, 87%, 88%, 89%, 90%, 91%, 92%, 93%, 94%, 95%, 96%, 97%, 98%, 99% sequence identity or is identical to the amino acid sequence of SEQ ID NO:751, a FR-L4 exhibiting at least 86%, 87%, 88%, 89%, 90%, 91%, 92%, 93%, 94%, 95%, 96%, 97%, 98%, 99% sequence identity or is identical to the amino acid sequence of SEQ ID NO:754, a FR-H1 exhibiting at least 86%, 87%, 88%, 89%, 90%, 91%, 92%, 93%, 94%, 95%, 96%, 97%, 98%, 99% sequence identity or is identical to the amino acid sequence of SEQ ID NO:756, a FR-H2 exhibiting at least 86%, 87%, 88%, 89%, 90%, 91%, 92%, 93%, 94%, 95%, 96%, 97%, 98%, 99% sequence identity or is identical to the amino acid sequence of SEQ ID NO:759, a FR-H3 exhibiting at least 86%, 87%, 88%, 89%, 90%, 91%, 92%, 93%, 94%, 95%, 96%, 97%, 98%, 99% sequence identity or is identical to the amino acid sequence of SEQ ID NO:760, and a FR-H4 exhibiting at least 86%, 87%, 88%, 89%, 90%, 91%, 92%, 93%, 94%, 95%, 96%, 97%, 98%, 99% sequence identity or is identical to the amino acid sequence of SEQ ID NO:764.

[0217] In another embodiment, the present disclosure provides an AF2 for use in any of the polypeptide embodiments described herein wherein the AF2 comprises a variable heavy (VH) amino acid sequence having at least 90%, 91%, 92%, 93%, 94%, 95%, 96%, 97%, 98%, 99% sequence identity or is identical to an amino acid sequence of SEQ ID NO:766 or SEQ ID NO:769. In another embodiment, the present disclosure provides an AF2 for use in any of the polypeptide embodiments described herein wherein the AF2 comprises a variable light (VL) amino acid sequence having at least 90%, 91%, 92%, 93%, 94%, 95%, 96%, 97%, 98%, 99% sequence identity or is identical to an amino acid sequence of any one of SEQ ID NOS: 765, 767, 768, 770, or 771. In another embodiment, the present disclosure provides an AF2 for use in any of the polypeptide embodiments described herein wherein the AF2 comprises a variable heavy (VH) amino acid sequence having at least 90%, 91%, 92%, 93%, 94%, 95%, 96%, 97%, 98%, 99% sequence identity or is identical to an amino acid sequence of SEQ ID NO:766 or SEQ ID NO:769 and a variable light (VL) amino acid sequence having at least 90%, 91%, 92%, 93%, 94%, 95%, 96%, 97%, 98%, 99% sequence identity or is identical to an amino acid sequence of any one of SEQ ID NOS: 765, 767, 768, 770, or 771.

[0218] In another embodiment, the present disclosure provides an AF2 for use in any of the polypeptide embodiments described herein wherein the AF2 comprises an amino acid sequence having at least 95%, 96%, 97%, 98%, 99% sequence identity or is identical to an amino acid sequence of any one of SEQ ID NOS:776-780.

[0219] In another aspect, the present disclosure provides AF2 antigen binding fragments that bind to the CD3 protein complex that have enhanced stability compared to CD3 binding antibodies or antigen binding fragments known in the art. Additionally, the CD3 antigen binding fragments of the disclosure are designed to confer a higher degree of stability on the chimeric bispecific antigen binding fragment compositions into which they are integrated, leading to improved expression and recovery of the fusion protein, increased shelf-life and enhanced stability when administered to a human or animal. In one approach, the CD3 AF2 of the present disclosure are designed to have a higher degree of thermal stability compared to certain CD3-binding antibodies and antigen binding fragments known in the art. As a result, the CD3 AF2 utilized as components of the chimeric bispecific antigen binding fragment compositions into which they are integrated exhibit favorable pharmaceutical properties, including high thermostability and low aggregation propensity, resulting in improved expression and recovery during manufacturing and storage, as well promoting long serum half-life. Biophysical properties such as thermostability are often limited by the antibody variable domains, which differ greatly in their intrinsic properties. High thermal stability is often associated with high expression levels and other desired properties, including being less susceptible to aggregation (Buchanan A, et al. Engineering a therapeutic IgG molecule to address cysteinylation, aggregation and enhance thermal stability and expression. MAbs 2013; 5:255). Thermal stability is determined by measuring the “melting temperature” (Tₘ), which is defined as the temperature at which half of the molecules are denatured. The melting temperature of each heterodimer is indicative of its thermal stability. In vitro assays to determine Tₘ are known in the art, including methods described in the Examples, below. The melting point of the heterodimer can be measured using techniques such as differential scanning calorimetry (Chen et al (2003) Pharm Res 20:1952-60; Ghirlando et al (1999) Immunol Lett 68:47-52). Alternatively, the thermal stability of the heterodimer can be measured using circular dichroism (Murray et al. (2002) J. Chromatogr Sci 40:343-9), or as described in the Examples, below.

[0220] Thermal denaturation curves of the CD3 binding fragments and the anti-CD3 bispecific antibodies comprising said anti-CD3 binding fragment and a reference binding of the present disclosure show that the constructs of the present disclosure are more resistant to thermal denaturation than the antigen binding fragment consisting of a sequence shown in SEQ ID NO:781 or a control bispecific antibody wherein said control bispecific antigen binding fragment comprises SEQ ID NO:781 and a reference antigen binding fragment that binds to an EGFR embodiment described herein. In one embodiment, the polypeptides of any of the human or animal composition embodiments described herein comprise an anti-CD3 AF2 of the embodiments described herein, wherein the Tₘ of the AF2 is at least 2° C. greater, or at least 3° C. greater, or at least 4° C. greater, or at least 5° C. greater, or at least 6° C. greater, or at least 7° C. greater, or at least 8° C. greater, or at least 9° C. greater, or at least 10° C. greater than the Tₘ of an antigen binding fragment consisting of a sequence of SEQ ID NO:781, as determined by an increase in melting temperature in an in vitro assay.

[0221] In another embodiment, the polypeptides of any of the human or animal composition embodiments described herein comprise an AF2 that specifically binds human or cyno CD3 with a dissociation constant (K_{d}) constant between about 10 nM and about 400 nM, or between about 50 nM and about 350 nM, or between about 100 nM and 300 nM, as determined in an in vitro antigen-binding assay comprising a human or cyno CD3 antigen. In another embodiment, the polypeptides of any of the human or animal composition embodiments described herein comprise an AF2 that specifically binds human or cyno CD3 with a dissociation constant (K_{d}) weaker than about 10 nM, or about 50 nM, or about 100 nM, or about 150 nM, or about 200 nM, or about 250 nM, or about 300 nM, or about 350 nM, or weaker than about 400 nM as determined in an in vitro antigen-binding assay. For clarity, an antigen binding fragment with a K_{d} of 400 binds its ligand more weakly than one with a K_{d} of 10 nM. In another embodiment, the polypeptides of any of the human or animal composition embodiments described herein comprise an AF2 that specifically binds human or cyno CD3 with at least 2-fold, 3-fold, 4-fold, 5-fold, 6-fold, 7-fold, 8-fold, 9-fold, or at least 10-fold weaker binding affinity than an antigen binding fragment consisting of an amino acid sequence of SEQ ID NO: 781, as determined by the respective dissociation constants (K_{d}) in an in vitro antigen-binding assays. In another embodiment, the present disclosure provides bispecific polypeptides comprising an AF2 that exhibits a binding affinity to CD3 that is at least 2-fold, 3-fold, 4-fold, 5-fold, 6-fold, 7-fold, 8-fold, 9-fold, 10-fold, 20-fold, 50-fold, 100-fold, or at least 1000-fold at weaker relative to that of the AF1 EGFR embodiments described herein that are incorporated into the human or animal polypeptides, as determined by the respective dissociation constants (K_{d}) in an in vitro antigen-binding assay. The binding affinity of the human or animal compositions for the target ligands can be assayed using binding or competitive binding assays, such as Biacore assays with chip-bound receptors or binding proteins or ELISA assays, as described in U.S. Pat. No. 5,534,617, assays described in the Examples herein, radio-receptor assays, or other assays known in the art. The binding affinity constant can then be determined using standard methods, such as Scatchard analysis, as described by van Zoelen, et al., Trends Pharmacol Sciences (1998) 19)12):487, or other methods known in the art.

[0222] In a related aspect, the present disclosure provides AF2 that bind to CD3 and are incorporated into chimeric, bispecific polypeptide compositions that are designed to have an isoelectric point (pI) that confer enhanced stability on the compositions of the disclosure compared to corresponding compositions comprising CD3 binding antibodies or antigen binding fragments known in the art. In one embodiment, the polypeptides of any of the human or animal composition embodiments described herein comprise AF2 that bind to CD3 wherein the AF2 exhibits a pI that is between 6.0 and 6.6, inclusive. In another embodiment, the polypeptides of any of the human or animal composition embodiments described herein comprise AF2 that bind to CD3 wherein the AF2 exhibits a pI that is at least 0.1, 0.2, 0.3, 0.4, 0.5, 0.6, 0.7, 0.8, 0.9, or 1.0 pH unit lower than the pI of a reference antigen binding fragment consisting of a sequence shown in SEQ ID NO: 781. In another embodiment, the polypeptides of any of the human or animal composition embodiments described herein comprise an AF2 that binds to CD3 fused to an AF1 that binds to an EGFR antigen wherein the AF2 exhibits a pI that is within at least 0.1, 0.2, 0.3, 0.4, 0.5, 0.6, 0.7, 0.8, 0.9, 1.0, 1.1, 1.2, 1.3, 1.4, or 1.5 pH units of the pI of the AF1 that binds EGFR antigen or an epitope thereof. In another embodiment, the polypeptides of any of the human or animal composition embodiments described herein comprise an AF2 that binds to CD3 fused to an AF1 that binds to an EGFR antigen wherein the AF2 exhibits a pI that is within at least about 0.1 to about 1.5, or at least about 0.3 to about 1.2, or at least about 0.5 to about 1.0, or at least about 0.7 to about 0.9 pH units of the pI of the AF1. It is specifically intended that by such design wherein the pI of the two antigen binding fragments are within such ranges, the resulting fused antigen binding fragments will confer a higher degree of stability on the chimeric bispecific antigen binding fragment compositions into which they are integrated, leading to improved expression and enhanced recovery of the fusion protein in soluble, non-aggregated form, increased shelf-life of the formulated chimeric bispecific polypeptide compositions, and enhanced stability when the composition is administered to a human or animal. State differently, having the AF2 and the AF1 within a relatively narrow pI range of can allow for the selection of a buffer or other solution in which both the AF2 and AF1 are stable, thereby promoting overall stability of the composition.

[0223] In certain embodiments, the VL and VH of the antigen binding fragments are fused by relatively long linkers, comprising 25, 26, 27, 28, 29, 30, 31, 32, 33, 34, or 35 hydrophilic amino acids that, when joined together, have a flexible characteristic. In one embodiment, the VL and VH of any of the scFv embodiments described herein are linked by relatively long linkers of hydrophilic amino acids that are GSGEGSEGEGGGEGSEGEGSGEGGEGEGSG (SEQ ID NO: 8058), TGSGEGSEGEGGGEGSEGEGSGEGGEGEGSGT (SEQ ID NO: 8059), GATPPETGAETESPGETTGGSAESEPPGEG (SEQ ID NO: 8060, or GSAAPTAGTTPSASPAPPTGGSSAAGSPST (SEQ ID NO: 8061). In another embodiment, the AF1 and AF2 are linked together by a short linker of hydrophilic amino acids having 3, 4, 5, 6, or 7 amino acids. In one embodiment, the short linker sequences are SGGGGS (SEQ ID NO: 8062), GGGGS (SEQ ID NO: 8063), GGSGGS (SEQ ID NO: 8064), GGS, or GSP. In another embodiment, the disclosure provides compositions comprising a single chain diabody in which after folding, the first domain (VL or VHI) is paired with the last domain (VHI or VL) to form one scFv and the two domains in the middle are paired to form the other scFv in which the first and second domains, as well as the third and last domains, are fused together by one of the foregoing short linkers and the second and the third variable domains are fused by one of the foregoing relatively long linkers. As will be appreciated by one of skill in the art, the selection of the short linker and relatively long linker is to prevent the incorrect pairing of adjacent variable domains, thereby facilitating the formation of the single chain diabody configuration comprising the VL and VHI of the first antigen binding fragment and the second antigen binding fragment.

TABLE 6b
Exemplary CD3 CDR Sequences

| | CDR | Amino Acid | SEQ |
|---|---|---|---|
| Construct | REGION | Sequence | ID NO: |
| 3.23, 3.30, 3.31, 3.32 | CDR-L1 | RSSNGAVTSSNYAN | 735 |
| 3.24 | CDR-L1 | RSSNGEVTTSNYAN | 736 |
| 3.33, 3.9 | CDR-L1 | RSSTGAVTTSNYAN | 737 |
| 3.23, 3.30, 3.31, 3.32, 3.9, 3.33 | CDR-L2 | GTNKRAP | 738 |
| 3.24 | CDR-L2 | GTIKRAP | 739 |
| 3.23, 3.24, 3.30, 3.31, 3.32 | CDR-L3 | ALWYPNLWVF | 740 |
| 3.33, 3.9 | CDR-L3 | ALWYSNLWVF | 741 |
| 3.23, 3.24, 3.30, 3.31, 3.32, 3.9 | CDR-H1 | GFTFNTYAMN | 742 |
| 3.23, 3.24, 3.30, 3.31, 3.32, 3.9 | CDR-H2 | RIRSKYNNYATYYADSVKD | 743 |
| 3.23. 3.24, 3.30, 3.31, 3.32 | CDR-H3 | HENFGNSYVSWFAH | 744 |
| 3.9 | CDR-H3 | HGNFGNSYVSWFAY | 745 |

TABLE 6c
Exemplary CD3 FR Sequences

| | FR | | SEQ ID |
|---|---|---|---|
| Construct | REGION | Amino Acid Sequence | NO: |
| 3.23, 3.24, 3.30, 3.31, 3.32, 3.9, | FR-L1 | ELVVTQEPSLTVSPGGTVTLTC | 746 |
| 3.33 | | | |
| 3.23, 3.24, 3.30, 3.31, 3.32, 3.9, | FR-L2 | WVQQKPGQAPRGLIG | 747 |
| 3.33 | | | |
| 3.23, 3.24 | FR-L3 | GTPARFSGSLLGGKAALTLSGVQPEDEAVYYC | 748 |
| 3.30 | FR-L3 | GTPARFSGSSLGGKAALTLSGVQPEDEAVYYC | 749 |
| 3.31 | FR-L3 | GTPARFSGSLLGGSAALTLSGVQPEDEAVYYC | 750 |
| 3.32 | FR-L3 | GTPARFSGSSLGGSAALTLSGVQPEDEAVYYC | 751 |
| 3.9 | FR-L3 | GTPARFSGSLLGGKAALTLSGVQPEDEAEYYC | 752 |
| 3.33 | FR-L3 | GTPARFSGSSLGGSAALTLSGVQPEDEAEYYC | 753 |
| 3.23, 3.24, 3.30, 3.31, 3.32, 3.9 | FR-L4 | GGGTKLTVL | 754 |
| 3.23, 3.24 | FR-H1 | EVQLLESGGGIVQPGGSLKLSCAAS | 755 |
| 3.30, 3.31, 3.32 | FR-H1 | EVQLQESGGGIVQPGGSLKLSCAAS | 756 |
| 3.33 | FR-H1 | EVQLQESGGGLVQPGGSLKLSCAAS | 757 |
| 3.9 | FR-H1 | EVQLLESGGGLVQPGGSLKLSCAAS | 758 |
| 3.23, 3.24, 3.30, 3.31, 3.32, 3.9, | FR-H2 | WVRQAPGKGLEWVA | 759 |
| 3.33 | | | |
| 3.23, 3.24, 3.30, 3.31, 3.32 | FR-H3 | RFTISRDDSKNTVYLQMNNLKTEDTAVYYCVR | 760 |
| 3.9 | FR-H3 | RFTISRDDSKNTAYLQMNNLKTEDTAVYYCVR | 762 |
| 3.23, 3.24, 3.30, 3.31, 3.32, 3.9, | FR-H4 | WGQGTLVTVSS | 764 |
| 3.33 | | | |

TABLE 6d
Exemplary VL & VH Sequences

| Construct | REGION | Amino Acid Sequence | SEQ ID NO: |
|---|---|---|---|
| 3.23 | VL | ELVVTQEPSLTVSPGGTVTLTCRSSNGAVTSSNYANWVQQKP | 765 |
| | | GQAPRGLIGGTNKRAPGTPARFSGSLLGGKAALTLSGVQPED | |
| | | EAVYYCALWYPNLWVFGGGTKLTVL | |
| 3.23, 3.24 | VH | EVQLLESGGGIVQPGGSLKLSCAASGFTFNTYAMNWVRQAP | 766 |
| | | GKGLEWVARIRSKYNNYATYYADSVKDRFTISRDDSKNTVY | |
| | | LQMNNLKTEDTAVYYCVRHENFGNSYVSWFAHWGQGTLV | |
| | | TVSS | |
| 3.24 | VL | ELVVTQEPSLTVSPGGTVTLTCRSSNGEVTTSNYANWVQQKP | 767 |
| | | GQAPRGLIGGTIKRAPGTPARFSGSLLGGKAALTLSGVQPEDE | |
| | | AVYYCALWYPNLWVFGGGTKLTVL | |
| 3.30 | VL | ELVVTQEPSLTVSPGGTVTLTCRSSNGAVTSSNYANWVQQKP | 768 |
| | | GQAPRGLIGGTNKRAPGTPARFSGSSLGGKAALTLSGVQPED | |
| | | EAVYYCALWYPNLWVFGGGTKLTVL | |
| 3.30, 3.31, | VH | EVQLQESGGGIVQPGGSLKLSCAASGFTFNTYAMNWVRQAP | 769 |
| 3.32 | | GKGLEWVARIRSKYNNYATYYADSVKDRFTISRDDSKNTVY | |
| | | LQMNNLKTEDTAVYYCVRHENFGNSYVSWFAHWGQGTLV | |
| | | TVSS | |
| 3.31 | VL | ELVVTQEPSLTVSPGGTVTLTCRSSNGAVTSSNYANWVQQKP | 770 |
| | | GQAPRGLIGGTNKRAPGTPARFSGSLLGGSAALTLSGVQPED | |
| | | EAVYYCALWYPNLWVFGGGTKLTVL | |
| 3.32 | VL | ELVVTQEPSLTVSPGGTVTLTCRSSNGAVTSSNYANWVQQKP | 771 |
| | | GQAPRGLIGGTNKRAPGTPARFSGSSLGGSAALTLSGVQPED | |
| | | EAVYYCALWYPNLWVFGGGTKLTVL | |
| 3.9 | VL | ELVVTQEPSLTVSPGGTVTLTCRSSTGAVTTSNYANWVQQKP | 772 |
| | | GQAPRGLIGGTNKRAPGTPARFSGSLLGGKAALTLSGVQPED | |
| | | EAEYYCALWYSNLWVFGGGTKLTVL | |
| 3.9 | VH | EVQLLESGGGLVQPGGSLKLSCAASGFTFNTYAMNWVRQAP | 773 |
| | | GKGLEWVARIRSKYNNYATYYADSVKDRFTISRDDSKNTAY | |
| | | LQMNNLKTEDTAVYYCVRHGNFGNSYVSWFAYWGQGTLV | |
| | | TVSS | |
| 3.33 | VL | ELVVTQEPSLTVSPGGTVTLTCRSSTGAVTTSNYANWVQQKP | 774 |
| | | GQAPRGLIGGTNKRAPGTPARFSGSSLGGSAALTLSGVQPED | |
| | | EAEYYCALWYSNLWVFGGGTKLTVL | |
| 3.33 | VH | EVQLQESGGGLVQPGGSLKLSCAASGFTFNTYAMNWVRQAP | 775 |
| | | GKGLEWVARIRSKYNNYATYYADSVKDRFTISRDDSKNTAY | |
| | | LQMNNLKTEDTAVYYCVRHGNFGNSYVSWFAYWGQGTLV | |
| | | TVSS | |

Table 6e: Exemplary scFv Sequences

### Anti-EpCAM Binding Domains

[0224] In some embodiments, the invention provides chimeric polypeptide assembly compositions comprising a binding domain with binding affinity to the tumor-specific marker EpCAM. In one embodiment, the binding domain comprises VL and VH derived form a monoclonal antibody to EpCAM. Monoclonal antibodies to EpCAM are known in the art. Exemplary, non-limiting examples of EpCAM monoclonal antibodies and the VL and VH sequences thereof are set forth in Table 6f. In one embodiment, the invention provides a chimeric polypeptide assembly composition comprising a binding domain with binding affinity to the tumor-specific marker EpCAM comprising anti-EpCAM VL and VH sequences set forth in Table 6f. In another embodiment, the invention provides a chimeric polypeptide assembly composition, wherein the first portion first binding domain comprises VH and VL regions wherein each VH and VL regions exhibit at least about 90%, or 91%, or 92%, or 93%, or 94%, or 95%, or 96%, or 97%, or 98%, or 99% identity to or is identical to paired VL and VH sequences of the 4D5MUCB anti-EpCAM antibody set forth in Table 6f. In another embodiment, the invention provides a chimeric polypeptide assembly composition comprising a binding domain with binding affinity to the tumor-specific marker comprising the CDR-L1 region, the CDR-L2 region, the CDR-L3 region, the CDR-H1 region, the CDR-H2 region, and the CDR-H3 region, wherein each is derived from the respective VL and VH sequences set forth in Table 6f.

TABLE 6f
Anti-target Cell Monoclonal Antibodies and Sequences

| | | | | SEQ | | | SEQ | |
|---|---|---|---|---|---|---|---|---|
| | | | | ID NO: | SEQ | | ID NO: | SEQ |
| Trade | Antibody | | | (full- | ID NO: | | (full- | ID NO: |
| Name | Name | Target | VH Sequence | length) | (CDRs) | VL Sequence | length) | (CDRs) |
| Tysabri ™ | nata- | Alpha 4 | QVQLVQSGAEV | 8065 | 8918, | DIQMTQSPSSLS | 8164 | 9178, |
| | lizumab | Integrin | KKPGASVKVSC | | 8919, | ASVGDRVTITC | | 9179, |
| | | | KASGFNIKDTYI | | 8920 | KTSQDINKYM | | 9180 |
| | | | HWVRQAPGQR | | | AWYQQTPGKA | | |
| | | | LEWMGRIDPA | | | PRLLIHYTSAL | | |
| | | | NGYTKYDPKF | | | QPGIPSRFSGSG | | |
| | | | QGRVTITADTS | | | SGRDYTFTISSL | | |
| | | | ASTAYMELSSL | | | QPEDIATYYCL | | |
| | | | RSEDTAVYYCA | | | QYDNLWTFGQ | | |
| | | | REGYYGNYGV | | | GTKVEIK | | |
| | | | YAMDYWGQGT | | | | | |
| | | | LVTVSS | | | | | |
| REGN910 | nesvac- | Ang2 | EVQLVESGGGL | 8066 | 8921, | EIVLTQSPGTLS | 8165 | 9181, |
| | umab | | VQPGGSLRLSC | | 8922, | LSPGERATLSCR | | 9182, |
| | | | AASGFTFSSYD | | 8923 | ASQSVSSTYLA | | 9183 |
| | | | IHWVRQATGK | | | WYQQKPGQAP | | |
| | | | GLEWVSAIGPA | | | RLLIYGASSRA | | |
| | | | GDTYYPGSVK | | | TGIPDRFSGSGS | | |
| | | | GRFTISRENAK | | | GTDFTLTISRLE | | |
| | | | NSLYLQMNSLR | | | PEDFAVYYCQH | | |
| | | | AGDTAVYYCA | | | YDNSQTFGQGT | | |
| | | | RGLITFGGLIA | | | KVEIK | | |
| | | | PFDYWGQGTL | | | | | |
| | | | VTVSS | | | | | |
| hMFE23 | | CEA | QVKLEQSGAEV | 8067 | 8924, | ENVLTQSPSSM | 8166 | 9184, |
| | | | VKPGASVKLSC | | 8925, | SASVGDRVNIA | | 9185, |
| | | | KASGFNIKDSY | | 8926 | CSASSSVSYMH | | 9186 |
| | | | MHWLRQGPGQ | | | WFQQKPGKSPK | | |
| | | | RLEWIGWIDPE | | | LWIYSTSNLAS | | |
| | | | NGDTEYAPKFQ | | | GVPSRFSGSGS | | |
| | | | GKATFTTDTSA | | | GTDYSLTISSM | | |
| | | | NTAYLGLSSLR | | | QPEDAATYYCQ | | |
| | | | PEDTAVYYCNE | | | QRSSYPLTFGG | | |
| | | | GTPTGPYYFDY | | | GTKLEIK | | |
| | | | WGQGTLVTVSS | | | | | |
| M5A | | CEA | EVQLVESGGGL | 8068 | 8927, | DIQLTQSPSSLS | 8167 | 9187, |
| (human- | | | VQPGGSLRLSC | | 8928, | ASVGDRVTITC | | 9188, |
| ized | | | AASGFNIKDTY | | 8929 | RAGESVDIFGV | | 9189 |
| T84.66) | | | MHWVRQAPGK | | | GFLHWYQQKP | | |
| | | | GLEWVARIDPA | | | GKAPKLLIYRA | | |
| | | | NGNSKYADSV | | | SNLESGVPSRFS | | |
| | | | KGRFTISADTS | | | GSGSRTDFTLTI | | |
| | | | KNTAYLQMNS | | | SSLQPEDFATY | | |
| | | | LRAEDTAVYYC | | | YCQQTNEDPY | | |
| | | | APFGYYVSDYA | | | TFGQGTKVEIK | | |
| | | | MAYWGQGTLV | | | | | |
| | | | TVSS | | | | | |
| M5B | | CEA | EVQLVESGGGL | 8069 | 8930, | DIQLTQSPSSLS | 8167 | 9187, |
| (human9 | | | VQPGGSLRLSC | | 8931, | ASVGDRVTITC | | 9188, |
| ized | | | AASGFNIKDTY | | 8929 | RAGESVDIFGV | | 9189 |
| T84.66) | | | MHWVRQAPGK | | | GFLHWYQQKP | | |
| | | | GLEWVARIDPA | | | GKAPKLLIYRA | | |
| | | | NGNSKYVPKF | | | SNLESGVPSRFS | | |
| | | | QGRATISADTS | | | GSGSRTDFTLTI | | |
| | | | KNTAYLQMNS | | | SSLQPEDFATY | | |
| | | | LRAEDTAVYYC | | | YCQQTNEDPY | | |
| | | | APFGYYVSDYA | | | TFGQGTKVEIK | | |
| | | | MAYWGQGTLV | | | | | |
| | | | TVSS | | | | | |
| CEA-Cide | Labet- | CEACAM5 | EVQLVESGGGV | 8070 | 8932, | DIQLTQSPSSLS | 8168 | 9190, |
| | uzumab | | VQPGRSLRLSC | | 8933, | ASVGDRVTITC | | 9191, |
| | (MN-14) | | SASGFDFTTYW | | 8934 | KASQDVGTSV | | 9192 |
| | | | MSWVRQAPGK | | | AWYQQKPGKA | | |
| | | | GLEWIGEIHPD | | | PKLLIYWTSTR | | |
| | | | SSTINYAPSLK | | | HTGVPSRFSGS | | |
| | | | DRFTISRDNAK | | | GSGTDFTFTISS | | |
| | | | NTLFLQMDSLR | | | QQYSLYRSFGQ | | |
| | | | PEDTGVYFCAS | | | GTKVEIK | | |
| | | | LYFGFPWFAY | | | | | |
| | | | WGQGTPVTVSS | | | | | |
| CEA-Scan | arcit- | CEACAM5 | EVKLVESGGGL | 8071 | 8935, | QTVLSQSPAILS | 8169 | 9193, |
| | umomab | | VQPGGSLRLSC | | 8936, | ASPGEKVTMTC | | 9194, |
| | | | ATSGFTFTDYY | | 8937 | RASSSVTYIHW | | 9195 |
| | | | MNWVRQPPGK | | | YQQKPGSSPKS | | |
| | | | ALEWLGFIGNK | | | WIYATSNLASG | | |
| | | | ANGYTTEYSAS | | | VPARFSGSGSG | | |
| | | | VKGRFTISRDKS | | | TSYSLTISRVEA | | |
| | | | QSILYLQMNTL | | | EDAATYYCQH | | |
| | | | RAEDSATYYCT | | | WSSKPPTFGGG | | |
| | | | RDRGLRFYFDY | | | TKLEIKR | | |
| | | | WGQGTTLTVSS | | | | | |
| MT110 | | CEACAM5 | EVQLVESGGGL | 8072 | 8938, | QAVLTQPASLS | 8170 | 9196, |
| | | | VQPGRSLRLSC | | 8939, | ASPGASASLTC | | 9197, |
| | | | AASGFTVSSYW | | 8940 | TLRRGINVGA | | 9198 |
| | | | MHWVRQAPGK | | | YSIYWYQQKPG | | |
| | | | GLEWVGFIRNK | | | SPPQYLLRYKS | | |
| | | | ANGGTTEYAA | | | DSDKQQGSGV | | |
| | | | SVKGRFTISRD | | | SSRFSASKDAS | | |
| | | | DSKNTLYLQM | | | ANAGILLISGLQ | | |
| | | | NSLRAEDTAVY | | | SEDEADYYCMI | | |
| | | | YCARDRGLRF | | | WHSGASAVFG | | |
| | | | YFDYWGQGTT | | | GGTKLTVL | | |
| | | | VTVSS | | | | | |
| MT103 | blinat- | CD19 | QVQLQQSGAEL | 8073 | 8941, | DIQLTQSPASLA | 8171 | 9199, |
| | umomab | | VRPGSSVKISCK | | 8942, | VSLGQRATISC | | 9200, |
| | | | ASGYAFSSYW | | 8943 | KASQSVDYDG | | 9201 |
| | | | MNWVKQRPGQ | | | DSYLNWYQQIP | | |
| | | | GLEWIGQIWPG | | | GQPPKLLIYDAS | | |
| | | | DGDTNYNGKF | | | NLVSGIPPRFSG | | |
| | | | KGKATLTADES | | | SGSGTDFTLNIH | | |
| | | | SSTAYMQLSSL | | | PVEKVDAATYH | | |
| | | | ASEDSAVYFCA | | | CQQSTEDPWT | | |
| | | | RRETTTVGRY | | | FGGGTKLEIK | | |
| | | | YYAMDYWGQ | | | | | |
| | | | GTTVTVSS | | | | | |
| Arzerra | ofat- | CD20 | EVQLVESGGGL | 8074 | 8944, | EIVLTQSPATLS | 8172 | 9202, |
| | umumab | | VQPGRSLRLSC | | 8945, | LSPGERATLSC | | 9203, |
| | | | AASGFTFNDYA | | 8946 | RASQSVSSYLA | | 9204 |
| | | | MHWVRQAPGK | | | WYQQKPGQAP | | |
| | | | GLEWVSTISWN | | | RLLIYDASNRA | | |
| | | | SGSIGYADSVK | | | TGIPARFSGSGS | | |
| | | | GRFTISRDNAK | | | GTDFTLTISSLE | | |
| | | | KSLYLQMNSLR | | | PEDFAVYYCQQ | | |
| | | | AEDTALYYCAK | | | RSNWPITFGQG | | |
| | | | DIQYGNYYYG | | | TRLEIK | | |
| | | | MDVWGQGTTV | | | | | |
| | | | TVSS | | | | | |
| Bexxar ™ | tosit- | CD20 | QAYLQQSGAEL | 8075 | 8947, | QIVLSQSPAILS | 8173 | 9205, |
| | umomab | | VRPGASVKMSC | | 8948, | ASPGEKVTMTC | | 9206, |
| | | | KASGYTFTSYN | | 8949 | RASSSVSYMH | | 9207 |
| | | | MHWVKQTPRQ | | | WYQQKPGSSPK | | |
| | | | GLEWIGAIYPG | | | PWIYAPSNLAS | | |
| | | | NGDTSYNQKF | | | GVPARFSGSGS | | |
| | | | KGKATLTVDKS | | | GTSYSLTISRVE | | |
| | | | SSTAYMQLSSL | | | AEDAATYYCQ | | |
| | | | TSEDSAVYFCA | | | QWSFNPPTFGA | | |
| | | | RVVYYSNSYW | | | GTKLELK | | |
| | | | YFDVWGTGTT | | | | | |
| | | | VTVSG | | | | | |
| GAZYVA | Obinut- | CD20 | QVQLVQSGAEV | 8076 | 8950, | DIVMTQTPLSLP | 8174 | 9208, |
| | uzumab | | KKPGSSVKVSC | | 8951, | VTPGEPASISCR | | 9209, |
| | | | KASGYAFSYSW | | 8952 | SSKSLLHSNGI | | 9210 |
| | | | INWVRQAPGQ | | | TYLYWYLQKP | | |
| | | | GLEWMGRIFP | | | GQSPQLLIYQM | | |
| | | | GDGDTDYNGK | | | SNLVSGVPDRF | | |
| | | | FKGRVTITADK | | | SGSGSGTDFTL | | |
| | | | STSTAYMELSS | | | KISRVEAEDVG | | |
| | | | LRSEDTAVYYC | | | VYYCAQNLEL | | |
| | | | ARNVFDGYWL | | | PYTFGGGTKVE | | |
| | | | VYWGQGTLVT | | | IK | | |
| | | | VSS | | | | | |
| | Ocrel- | CD20 | EVQLVESGGGL | 8077 | 8953, | DIQMTQSPSSLS | 8175 | 8911, |
| | izumab/ | | VQPGGSLRLSC | | 8954, | ASVGDRVTITC | | 9206, |
| | 2H7 v16 | | AASGYTFTSYN | | 8949 | RASSSVSYMH | | 9207 |
| | | | MHWVRQAPGK | | | WYQQKPGKAP | | |
| | | | GLEWVGAIYPG | | | KPLIYAPSNLAS | | |
| | | | NGDTSYNQKF | | | GVPSRFSGSGS | | |
| | | | KGRFTISVDKS | | | GTDFTLTISSLQ | | |
| | | | KNTLYLQMNSL | | | PEDFATYYCQQ | | |
| | | | RAEDTAVYYC | | | WSFNPPTFGG | | |
| | | | ARVVYYSNSY | | | TKVEIK | | |
| | | | WYFDVWGQGT | | | | | |
| | | | LVTVSS | | | | | |
| Rituxan ™ | rituximab | CD20 | QVQLQQPGAEL | 8078 | 8953, | QIVLSQSPAILS | 8176 | 9211, |
| | | | VKPGASVKMSC | | 8954, | ASPGEKVTMTC | | 9212, |
| | | | KASGYTFTSYN | | 8955 | RASSSVSYIHW | | 9213 |
| | | | MHWVKQTPGR | | | FQQKPGSSPKP | | |
| | | | GLEWIGAIYPG | | | WIYATSNLASG | | |
| | | | NGDTSYNQKF | | | VPVRFSGSGSG | | |
| | | | KGKATLTADKS | | | TSYSLTISRVEA | | |
| | | | SSTAYMQLSSL | | | EDAATYYCQQ | | |
| | | | TSEDSAVYYCA | | | WTSNPPTFGGG | | |
| | | | RSTYYGGDWY | | | TKLEIK | | |
| | | | FNVWGAGTTV | | | | | |
| | | | TVSA | | | | | |
| Zevalin ™ | ibrit- | CD20 | QAYLQQSGAEL | 8079 | 8953, | QIVLSQSPAILS | 8173 | 8911, |
| | umomab | | VRPGASVKMSC | | 8956, | ASPGEKVTMTC | | 9206, |
| | tieuxetan | | KASGYTFTSYN | | 8949 | RASSSVSYMH | | 9207 |
| | | | MHWVKQTPRQ | | | WYQQKPGSSPK | | |
| | | | GLEWIGAIYPG | | | PWIYAPSNLAS | | |
| | | | NGDTSYNQKF | | | GVPARFSGSGS | | |
| | | | KGKATLTVDKS | | | GTSYSLTISRVE | | |
| | | | SSTAYMQLSSL | | | AEDAATYYCQ | | |
| | | | TSEDSAVYFCA | | | QWSFNPPTFGA | | |
| | | | RVVYYSNSYW | | | GTKLELK | | |
| | | | YFDVWGTGTT | | | | | |
| | | | VTVSA | | | | | |
| Mylotarg | Gemtuzu- | CD33 | QLVQSGAEVKK | 8080 | 8957, | DIQLTQSPSTLS | 8177 | 9214, |
| | mab | | PGSSVKVSCKA | | 8958, | ASVGDRVTITC | | 9215, |
| | (hP67.6) | | SGYTITDSNIH | | 8959 | RASESLDNYGI | | 9216 |
| | | | WVRQAPGQSLE | | | RFLTWFQQKP | | |
| | | | WIGYIYPYNGG | | | GKAPKLLMYA | | |
| | | | TDYNQKFKNR | | | ASNQGSGVPSR | | |
| | | | ATLTVDNPTNT | | | FSGSGSGTEFTL | | |
| | | | AYMELSSLRSE | | | TISSLQPDDFAT | | |
| | | | DTDFYYCVNG | | | YYCQQTKEVP | | |
| | | | NPWLAYWGQG | | | WSFGQGTKVE | | |
| | | | TLVTVSS | | | VK | | |
| Darat- | | CD38 | EVQLLESGGGL | 8081 | 8960, | EIVLTQSPATLS | 8178 | 9217, |
| umumab | | | VQPGGSLRLSC | | 8961, | LSPGERATLSCR | | 9218, |
| | | | AVSGFTFNSFA | | 8962 | ASQSVSSYLAW | | 9219 |
| | | | MSWVRQAPGK | | | YQQKPGQAPRL | | |
| | | | GLEWVSAISGS | | | LIYDASNRATGI | | |
| | | | GGGTYYADSV | | | PARFSGSGSGT | | |
| | | | KGRFTISRDNSK | | | DFTLTISSLEPE | | |
| | | | NTLYLQMNSLR | | | DFAVYYCQQR | | |
| | | | AEDTAVYFCAK | | | SNWPPTFGQGT | | |
| | | | DKILWFGEPVF | | | KVEIK | | |
| | | | DYWGQGTLVT | | | | | |
| | | | VSS | | | | | |
| | 1F6 | CD70 | QIQLVQSGPEV | 8082 | 8963, | DIVLTQSPASLA | 8179 | 9220, |
| | | | KKPGETVKISC | | 8964, | VSLGQRATISC | | 9221, |
| | | | KASGYTFTNY | | 8965 | RASKSVSTSGY | | 9222 |
| | | | GMNWVKQAPG | | | SFMHWYQQKP | | |
| | | | KGLKWMGWIN | | | GQPPKLLIYLAS | | |
| | | | TYTGEPTYAD | | | NLESGVPARFS | | |
| | | | AFKGRFAFSLE | | | GSGSGTDFTLNI | | |
| | | | TSASTAYLQIN | | | HPVEEEDAATY | | |
| | | | NLKNEDTATYF | | | YCQHSREVPW | | |
| | | | CARDYGDYGM | | | TFGGGTKLEIK | | |
| | | | DYWGQGTSVT | | | | | |
| | | | VSS | | | | | |
| | 2F2 | CD70 | QVQLQQSGTEL | 8083 | 8966, | DIVLTQSPASLT | 8180 | 9220, |
| | | | MTPGASVTMSC | | 8967, | VSLGQKTTISCR | | 9223, |
| | | | KTSGYTFSTY | | 8968 | ASKSVSTSGYS | | 9224 |
| | | | WIEWVKQRPG | | | FMHWYQLKPG | | |
| | | | HGLEWIGEILG | | | QSPKLLIYLASD | | |
| | | | PSGYTDYNEKF | | | LPSGVPARFSG | | |
| | | | KAKATFTADTS | | | SGSGTDFTLKIH | | |
| | | | SNTAYMQLSSL | | | PVEEEDAATY | | |
| | | | ASEDSAVYYCA | | | YCQHSREIPYT | | |
| | | | RWDRLYAMD | | | FGGGTKLEIT | | |
| | | | YWGGGTSVTV | | | | | |
| | | | SS | | | | | |
| | 2H5 | CD70 | QVQLVESGGGV | 8084 | 8969, | EIVLTQSPATLS | 8181 | 9202, |
| | | | VQPGRSLRLSC | | 8970, | LSPGERATLSC | | 9225, |
| | | | AASGFTFSSYI | | 8971 | RASQSVSSYLA | | 9226 |
| | | | MHWVRQAPGK | | | WYQQKPGQAP | | |
| | | | GLEWVAVISYD | | | RLLIYDASNRA | | |
| | | | GRNKYYADSV | | | TGIPARFSGSGS | | |
| | | | KGRFTISRDNS | | | GTDFTLTISSLE | | |
| | | | KNTLYLQMNSL | | | PEDFAVYYCQQ | | |
| | | | RAED | | | RTNWPLTFGG | | |
| | | | TAVYYCARDT | | | GTKVEIK | | |
| | | | DGYDFDYWGQ | | | | | |
| | | | GTLVTVSS | | | | | |
| | 10B4 | CD70 | QIQLVESGGGV | 8085 | 8972, | AIQLTQSPSSLS | 8182 | 9227, |
| | | | VQPGRSLRLSC | | 8973, | ASVGDRVTITC | | 9228, |
| | | | AASGFTFGYYA | | 8974 | RASQGISSALA | | 9229 |
| | | | MHWVRQAPGK | | | WYQQKPGKAP | | |
| | | | GLEWVAVISYD | | | KFLIYDASSLES | | |
| | | | GSIKYYADSVK | | | GVPSRFSGSGS | | |
| | | | GRFTISRDNSK | | | GTDFTLTISSLQ | | |
| | | | NTLYLQMNSLR | | | PEDFATYYCQQ | | |
| | | | AED | | | FNSYPFTFGPG | | |
| | | | TAVYYCAREG | | | TKVDIK | | |
| | | | PYSNYLDYWG | | | | | |
| | | | QGTLVTVSS | | | | | |
| | 8B5 | CD70 | QVQLVESGGGV | 8086 | 8975, | DIQMTQSPSSLS | 8183 | 9230, |
| | | | VQPGRSLRLSC | | 8976, | ASVGDRVTITC | | 9231, |
| | | | ATSGFTFSDYG | | 8977 | RASQGISSWLA | | 9232 |
| | | | MHWVRQAPGK | | | WYQQKPEKAP | | |
| | | | GLEWVAVIWY | | | KSLIYAASSLQS | | |
| | | | DGSNKYYADS | | | GVPSRFSGSGS | | |
| | | | VKGRFTISRDN | | | GTDFTLTISSLQ | | |
| | | | SKKTLSLQMNS | | | PEDFATYYCQQ | | |
| | | | LRAED | | | YNSYPLTFGGG | | |
| | | | TAVYYCARDSI | | | TKVEIK | | |
| | | | MVRGDYWGQ | | | | | |
| | | | GTLVTVSS | | | | | |
| | 18E7 | CD70 | QVQLVESGGGV | 8087 | 8978, | DIQMTQSPSSLS | 8183 | 9230, |
| | | | VQPGRSLRLSC | | 8976, | ASVGDRVTITC | | 9231, |
| | | | AASGFTFSDHG | | 8977 | RASQGISSWLA | | 9232 |
| | | | MHWVRQAPGK | | | WYQQKPEKAP | | |
| | | | GLEWVAVIWY | | | KSLIYAASSLQS | | |
| | | | DGSNKYYADS | | | GVPSRFSGSGS | | |
| | | | VKGRFTISRDN | | | GTDFTLTISSLQ | | |
| | | | SKNTLYLQMNS | | | PEDFATYYCQQ | | |
| | | | LRAED | | | YNSYPLTFGGG | | |
| | | | TAVYYCARDSI | | | TKVEIK | | |
| | | | MVRGDYWGQ | | | | | |
| | | | GTLVTVSS | | | | | |
| | 69A7 | CD70 | QVQLQESGPGL | 8088 | 8979, | EIVLTQSPATLS | 8184 | 9202, |
| | | | VKPSETLSLTCT | | 8980, | LSPGERATLSC | | 9203, |
| | | | VSGGSVSSDYY | | 8981 | RASQSVSSYLA | | 9233 |
| | | | YWSWIRQPPGK | | | WYQQKPGQAP | | |
| | | | GLEWLGYIYYS | | | RLLIFDASNRA | | |
| | | | GSTNYNPSLKS | | | TGIPARFSGSGS | | |
| | | | RVTISVDTSKN | | | GTDFTLTISSLE | | |
| | | | QFSLKLRSVTT | | | PEDFAVYYCQQ | | |
| | | | A | | | RSNWPLTFGG | | |
| | | | DTAVYYCARG | | | GTKVEIK | | |
| | | | DGDYGGNCFD | | | | | |
| | | | YWGQGTLVTV | | | | | |
| | | | SS | | | | | |
| CE-355621 | | cMET | QVQLVQSGAEV | 8089 | 8982, | DIQMTQSPSSVS | 8185 | 9234, |
| | | | KKPGASVKVSC | | 8983, | ASVGDRVTITC | | 9235, |
| | | | KASGYTFTSYG | | 8984 | RASQGINTWL | | 9236 |
| | | | FSWVRQAPGQ | | | AWYQQKPGKA | | |
| | | | GLEWMGWISA | | | PKLLIYAASSLK | | |
| | | | SNGNTYYAQK | | | SGVPSRFSGSGS | | |
| | | | LQGRVTMTTD | | | GTDFTLTISSLQ | | |
| | | | TSTSTAYMELR | | | PEDFATYYCQQ | | |
| | | | SLRSDDTAVYY | | | ANSFPLTFGGG | | |
| | | | CARVYADYAD | | | TKVEIK | | |
| | | | YWGQGTLVTV | | | | | |
| | | | SS | | | | | |
| LY2875358 | emibet- | CMET | QVQLVQSGAEV | 8090 | 8985, | DIQMTQSPSSLS | 8186 | 9237, |
| | uzumab | | KKPGASVKVSC | | 8986, | ASVGDRVTITC | | 9238, |
| | | | KASGYTFTDY | | 8987 | SVSSSVSSIYLH | | 9239 |
| | | | YMHWVRQAPG | | | WYQQKPGKAP | | |
| | | | QGLEWMGRVN | | | KLLIYSTSNLAS | | |
| | | | PNRRGTTYNQ | | | GVPSRFSGSGS | | |
| | | | KFEGRVTMTTD | | | GTDFTLTISSLQ | | |
| | | | TSTSTAYMELR | | | PEDFATYYCQV | | |
| | | | SLRSDDTAVYY | | | YSGYPLTFGGG | | |
| | | | CARANWLDY | | | TKVEIK | | |
| | | | WGQGTTVTVSS | | | | | |
| MetMAb | onart- | cMET | EVQLVESGGGL | 8091 | 8988, | DIQMTQSPSSLS | 8187 | 9240, |
| | uzumab | | VQPGGSLRLSC | | 8989, | ASVGDRVTITC | | 9241, |
| | | | AASGYTFTSYW | | 8990 | KSSQSLLYTSS | | 9242 |
| | | | LHWVRQAPGK | | | QKNYLAWYQQ | | |
| | | | GLEWVGMIDPS | | | KPGKAPKLLIY | | |
| | | | NSDTRFNPNFK | | | WASTRESGVPS | | |
| | | | DRFTISADTSKN | | | RFSGSGSGTDFT | | |
| | | | TAYLQMNSLRA | | | LTISSLQPEDFA | | |
| | | | EDTAVYYCAT | | | TYYCQQYYAY | | |
| | | | YRSYVTPLDY | | | PWTFGQGTKV | | |
| | | | WGQGTLVTVSS | | | EIK | | |
| | tremel- | CTLA4 | QVQLVESGGGV | 8092 | 8991, | DIQMTQSPSSLS | 8188 | 9243, |
| | imumab | | VQPGRSLRLSC | | 8992, | ASVGDRVTITC | | 9231, |
| | (CP- | | AASGFTFSSYG | | 8993 | RASQSINSYLD | | 9244 |
| | 675206, | | MHWVRQAPGK | | | WYQQKPGKAP | | |
| | or | | GLEWVAVIWY | | | KLLIYAASSLQS | | |
| | 11.2.1) | | DGSNKYYADS | | | GVPSRFSGSGS | | |
| | | | VKGRFTISRDNS | | | GTDFTLTISSLQ | | |
| | | | KNTLYLQMNSL | | | PEDFATYYCQQ | | |
| | | | RAEDTAVYYC | | | YYSTPFTFGPG | | |
| | | | ARDPRGATLY | | | TKVEIK | | |
| | | | YYYYGMDVW | | | | | |
| | | | GQGTTVTVSS | | | | | |
| Yervoy | Ipili- | CTLA4 | QVQLVESGGGV | 8093 | 8994, | EIVLTQSPGTLS | 8189 | 9245, |
| | mumab | | VQPGRSLRLSC | | 8995, | LSPGERATLSC | | 9246, |
| | 10D1 | | AASGFTFSSYT | | 8996 | RASQSVGSSYL | | 9247 |
| | | | MHWVRQAPGK | | | AWYQQKPGQA | | |
| | | | GLEWVTFISYD | | | PRLLIYGAFSR | | |
| | | | GNNKYYADSV | | | ATGIPDRFSGSG | | |
| | | | KGRFTISRDNS | | | SGTDFTLTISRL | | |
| | | | KNTLYLQMNSL | | | EPEDFAVYYCQ | | |
| | | | RAEDTAIYYCA | | | QYGSSPWTFG | | |
| | | | RTGWLGPFDY | | | QGTKVEIK | | |
| | | | WGQGTLVTVSS | | | | | |
| AGS16F | H16-7.8 | ENPP3 | QVQLQESGPGL | 8094 | 8997, | EIVLTQSPDFQS | 8190 | 9248, |
| | | | VKPSQTLSLTCT | | 8998, | VTPKEKVTITC | | 9249, |
| | | | VSGGSISSGGY | | 8999 | RASQSIGISLH | | 9250 |
| | | | YWSWIRQHPG | | | WYQQKPDQSP | | |
| | | | KGLEWIGIIYYS | | | KLLIKYASQSFS | | |
| | | | GSTYYNPSLKS | | | GVPSRFSGSGS | | |
| | | | RVTISVDTSKN | | | GTDFTLTINSLE | | |
| | | | QFSLKLNSVTA | | | AEDAATYYCH | | |
| | | | ADTAVFYCARV | | | QSRSFPWTFGQ | | |
| | | | AIVTTIPGGMD | | | GTKVEIK | | |
| | | | VWGQGTTVTV | | | | | |
| | | | SS | | | | | |
| MT110 | solitomab | EpCAM | EVQLLEQSGAE | 8095 | 9000, | ELVMTQSPSSL | 8191 | 9251, |
| | | | LVRPGTSVKISC | | 9001, | TVTAGEKVTMS | | 9241, |
| | | | KASGYAFTNY | | 9002 | CKSSQSLLNSG | | 9252 |
| | | | WLGWVKQRPG | | | NQKNYLTWYQ | | |
| | | | HGLEWIGDIFP | | | QKPGQPPKLLIY | | |
| | | | GSGNIHYNEKF | | | WASTRESGVP | | |
| | | | KGKATLTADKS | | | DRFTGSGSGTD | | |
| | | | SSTAYMQLSSL | | | FTLTISSVQAED | | |
| | | | TFEDSAVYFCA | | | LAVYYCQNDY | | |
| | | | RLRNWDEPMD | | | SYPLTFGAGTK | | |
| | | | YWGQGTTVTV | | | LEIK | | |
| | | | SS | | | | | |
| MT201 | Adecat- | EpCAM | EVQLLESGGGV | 8096 | 9003, | ELQMTQSPSSLS | 8192 | 9253, |
| | umumab | | VQPGRSLRLSC | | 9004, | ASVGDRVTITC | | 9241, |
| | | | AASGFTFSSYG | | 9005 | RTSQSISSYLN | | 9254 |
| | | | MHWVRQAPGK | | | WYQQKPGQPP | | |
| | | | GLEWVAVISYD | | | KLLIYWASTRE | | |
| | | | GSNKYYADSV | | | SGVPDRFSGSG | | |
| | | | KGRFTISRDNS | | | SGTDFTLTISSL | | |
| | | | KNTLYLQMNSL | | | QPEDSATYYCQ | | |
| | | | RAEDTAVYYC | | | QSYDIPYTFGQ | | |
| | | | AKDMGWGSG | | | GTKLEIK | | |
| | | | WRPYYYYGM | | | | | |
| | | | DVWGQGTTVT | | | | | |
| | | | VSS | | | | | |
| Panorex | Edreco- | EpCAM | QVQLQQSGAEL | 8097 | 9006, | NIVMTQSPKSM | 8193 | 9255, |
| | lomab | | VRPGTSVKVSC | | 9007, | SMSVGERVTLT | | 9256, |
| | Mab | | KASGYAFTNY | | 9008 | CKASENVVTY | | 9257 |
| | CO17-1A | | LIEWVKQRPGQ | | | VSWYQQKPEQS | | |
| | | | GLEWIGVINPG | | | PKLLIYGASNR | | |
| | | | SGGTNYNEKFK | | | YTGVPDRFTGS | | |
| | | | GKATLTADKSS | | | GSATDFTLTISS | | |
| | | | STAYMQLSSLT | | | VQAEDLADYH | | |
| | | | SDDSAVYFCAR | | | CGQGYSYPYTF | | |
| | | | DGPWFAYWGQ | | | GGGTKLEIK | | |
| | | | GTLVTVSA | | | | | |
| | tucot- | EpCAM | QIQLVQSGPEL | 8098 | 8963, | QILLTQSPAIMS | 8194 | 9258, |
| | uzumab | | KKPGETVKISC | | 9009, | ASPGEKVTMTC | | 9259, |
| | | | KASGYTFTNY | | 9010 | SASSSVSYMLW | | 9260 |
| | | | GMNWVRQAPG | | | YQQKPGSSPKP | | |
| | | | KGLKWMGWIN | | | WIFDTSNLASG | | |
| | | | TYTGEPTYAD | | | FPARFSGSGSGT | | |
| | | | DFKGRFVFSLE | | | SYSLIISSMEAE | | |
| | | | TSASTAFLQLN | | | DAATYYCHQR | | |
| | | | NLRSEDTATYF | | | SGYPYTFGGGT | | |
| | | | CVRFISKGDYW | | | KLEIK | | |
| | | | GQGTSVTVSS | | | | | |
| UBS-54 | | EpCAM | VQLQQSDAELV | 8099 | 9011, | DIVMTQSPDSL | 8195 | 9261, |
| | | | KPGASVKISCK | | 9012, | AVSLGERATIN | | 9241, |
| | | | ASGYTFTDHAI | | 9013 | CKSSQSVLYSS | | 9262 |
| | | | HWVKQNPEQG | | | NNKNYLAWYQ | | |
| | | | LEWIGYFSPGN | | | QKPGQPPKLLIY | | |
| | | | DDFKYNERFK | | | WASTRESGVP | | |
| | | | GKATLTADKSS | | | DRFSGSGSGTD | | |
| | | | STAYVQLNSLT | | | FTLTISSLQAED | | |
| | | | SEDSAVYFCTR | | | VAVYYCQQYY | | |
| | | | SLNMAYWGQG | | | SYPLTFGGGTK | | |
| | | | TSVTVSS | | | VKES | | |
| 3622W94 | 323/A3 | EpCAM | EVQLVQSGPEV | 8100 | 8963, | DIVMTQSPLSLP | 8196 | 9263, |
| | | | KKPGASVKVSC | | 9014, | VTPGEPASISCR | | 9264, |
| | | | KASGYTFTNY | | 9015 | SSINKKGSNGI | | 9265 |
| | | | GMNWVRQAPG | | | TYLYWYLQKP | | |
| | | | QGLEWMGWIN | | | GQSPQLLIYQM | | |
| | | | TYTGEPTYGE | | | SNLASGVPDRF | | |
| | | | DFKGRFAFSLD | | | SGSGSGTDFTL | | |
| | | | TSASTAYMELS | | | KISRVEAEDVG | | |
| | | | SLRSEDTAVYF | | | VYYCAQNLEIP | | |
| | | | CARFGNYVDY | | | RTFGQGTKVEI | | |
| | | | WGQGSLVTVSS | | | K | | |
| 4D5MOCB | | EpCAM | EVQLVQSGPGL | 8101 | 9016, | DIQMTQSPSSLS | 8197 | 9266, |
| v2 | | | VQPGGSVRISC | | 9017, | ASVGDRVTITC | | 9267, |
| | | | AASGYTFTNYG | | 9018 | RSTKSLLHSNG | | 9265 |
| | | | MNWVKQAPGK | | | ITYLYWYQQKP | | |
| | | | GLEWMGWINT | | | GKAPKLLIYQM | | |
| | | | YTGESTYADSF | | | SNLASGVPSRFS | | |
| | | | KGRFTFSLDTS | | | SSGSGTDFTLTI | | |
| | | | ASAAYLQINSL | | | SSLQPEDFATY | | |
| | | | RAEDTAVYYC | | | YCAQNLEIPRT | | |
| | | | ARFAIKGDYW | | | FGQGTKVEIK | | |
| | | | GQGTLLTVSS | | | | | |
| 4D5MOCB | | EpCAM | EVQLVQSGPGL | 8101 | 9016, | DIQMTQSPSSLS | 8198 | 9266, |
| | | | VQPGGSVRISC | | 9017, | ASVGDRVTITC | | 9267, |
| | | | AASGYTFTNYG | | 9019 | RSTKSLLHSNG | | 9265 |
| | | | MNWVKQAPGK | | | ITYLYWYQQKP | | |
| | | | GLEWMGWINT | | | GKAPKLLIYQM | | |
| | | | YTGESTYADSF | | | SNLASGVPSRFS | | |
| | | | KGRFTFSLDTS | | | SSGSGTDFTLTI | | |
| | | | ASAAYLQINSL | | | SSLQPEDFATY | | |
| | | | RAEDTAVYYC | | | YCAQNLEIPRT | | |
| | | | ARFAIKGDYW | | | FGQGTKVELK | | |
| | | | GQGTLLTVSS | | | | | |
| MEDI-547 | 1C1 | EphA2 | EVQLLESGGGL | 8102 | 9020, | DIQMTQSPSSLS | 8199 | 9268, |
| | | | VQPGGSLRLSC | | 9021, | ASVGDRVTITC | | 9269, |
| | | | AASGFTFSHYM | | 9022 | RASQSISTWLA | | 9270 |
| | | | MAWVRQAPGK | | | WYQQKPGKAP | | |
| | | | GLEWVSRIGPS | | | KLLIYKASNLH | | |
| | | | GGPTHYADSV | | | TGVPSRFSGSGS | | |
| | | | KGRFTISRDNS | | | GTEFSLTISGLQ | | |
| | | | KNTLYLQMNSL | | | PDDFATYYCQQ | | |
| | | | RAEDTAVYYC | | | YNSYSRTFGQG | | |
| | | | AGYDSGYDYV | | | TKVEIK | | |
| | | | AVAGPAEYFQ | | | | | |
| | | | HWGQGTLVTV | | | | | |
| | | | SS | | | | | |
| MORAb- | farlet- | FOLR1 | EVQLVESGGGV | 8103 | 9023, | DIQLTQSPSSLS | 8200 | 9271, |
| 003 | uzumab | | VQPGRSLRLSC | | 9024, | ASVGDRVTITC | | 9272, |
| | | | SASGFTFSGYG | | 9025 | SVSSSISSNNLH | | 9273 |
| | | | LSWVRQAPGK | | | WYQQKPGKAP | | |
| | | | GLEWVAMISSG | | | KPWIYGTSNLA | | |
| | | | GSYTYYADSV | | | SGVPSRFSGSGS | | |
| | | | KGRFAISRDNA | | | GTDYTFTISSLQ | | |
| | | | KNTLFLQMDSL | | | PEDIATYYCQQ | | |
| | | | RPEDTGVYFCA | | | WSSYPYMYTF | | |
| | | | RHGDDPAWFA | | | GQGTKVEIK | | |
| | | | YWGQGTPVTV | | | | | |
| | | | SS | | | | | |
| M9346A | huMOV19 | FOLR1 | QVQLVQSGAEV | 8104 | 9026, | DIVLTQSPLSLA | 8201 | 9274, |
| | (vLCv1. | | VKPGASVKISC | | 9027, | VSLGQPAIISCK | | 9275, |
| | 00) | | KASGYTFTGYF | | 9028 | ASQSVSFAGTS | | 9276 |
| | | | MNWVKQSPGQ | | | LMHWYHQKPG | | |
| | | | SLEWIGRIHPY | | | QQPRLLIYRAS | | |
| | | | DGDTFYNQKF | | | NLEAGVPDRFS | | |
| | | | QGKATLTVDKS | | | GSGSKTDFTLNI | | |
| | | | SNTAHMELLSL | | | SPVEAEDAATY | | |
| | | | TSEDFAVYYCT | | | YCQQSREYPY | | |
| | | | RYDGSRAMDY | | | TFGGGTKLEIK | | |
| | | | WGQGTTVTVSS | | | | | |
| M9346A | huMOV19 | FOLR1 | QVQLVQSGAEV | 8105 | 9026, | DIVLTQSPLSLA | 8202 | 9274, |
| | (vLCv1. | | VKPGASVKISC | | 9027, | VSLGQPAIISCK | | 9275, |
| | 60) | | KASGYTFTGYF | | 9029 | ASQSVSFAGTS | | 9276 |
| | | | MNWVKQSPGQ | | | LMHWYHQKPG | | |
| | | | SLEWIGRIHPY | | | QQPRLLIYRAS | | |
| | | | DGDTFYNQKF | | | NLEAGVPDRFS | | |
| | | | QGKATLTVDKS | | | GSGSKTDFTLTI | | |
| | | | SNTAHMELLSL | | | SPVEAEDAATY | | |
| | | | TSEDFAVYYCT | | | YCQQSREYPY | | |
| | | | RYDGSRAMDY | | | TFGGGTKLEIK | | |
| | | | WGQGTTVTVSS | | | | | |
| 26B3.F2 | | FOLR1 | GPELVKPGASV | 8106 | 9026, | PASLSASVGET | 8203 | 9277, |
| | | | KISCKASDYSFT | | 9030, | VTITCRTSENIF | | 9278, |
| | | | GYFMNWVMQ | | 9031 | SYLAWYQQKQ | | 9279 |
| | | | SHGKSLEWIGR | | | GISPQLLVYNA | | |
| | | | IFPYNGDTFYN | | | KTLAEGVPSRF | | |
| | | | QKFKGRATLT | | | SGSGSGTQFSL | | |
| | | | VDKSSSTAHME | | | KINSLQPEDFGS | | |
| | | | LRSLASEDSAV | | | YYCQHHYAFP | | |
| | | | YFCARGTHYF | | | WTFGGGSKLEI | | |
| | | | DYWGQGTTLT | | | K | | |
| | | | VSS | | | | | |
| RG7686 | GC33 | GPC3 | QVQLVQSGAEV | 8107 | 9032, | DVVMTQSPLSL | 8204 | 9280, |
| | | | KKPGASVKVSC | | 9033, | PVTPGEPASISC | | 9281, |
| | | | KASGYTFTDYE | | 9034 | RSSQSLVHSNG | | 9282 |
| | | | MHWVRQAPGQ | | | NTYLHWYLQK | | |
| | | | GLEWMGALDP | | | PGQSPQLLIYK | | |
| | | | KTGDTAYSQK | | | VSNRFSGVPDR | | |
| | | | FKGRVTLTADK | | | FSGSGSGTDFTL | | |
| | | | STSTAYMELSS | | | KISRVEAEDVG | | |
| | | | LTSED | | | V | | |
| | | | TAVYYCTRFYS | | | YYCSQNTHVPP | | |
| | | | YTYWGQGTLV | | | TFGQGTKLEIK | | |
| | | | TVSS | | | | | |
| | 4A6 | GPC3 | EVQLVQSGAEV | 8108 | 9035, | EIVLTQSPGTLS | 8205 | 9283, |
| | | | KKPGESLKISCK | | 9036, | LSPGERATLSC | | 9182, |
| | | | GSGYSFTSYWI | | 9037 | RAVQSVSSSYL | | 9284 |
| | | | AWVRQMPGKG | | | AWYQQKPGQA | | |
| | | | LEWMGIIFPGD | | | PRLLIYGASSRA | | |
| | | | SDTRYSPSFQG | | | TGIPDRFSGSGS | | |
| | | | QVTISADRSIRT | | | GTDFTLTISRLE | | |
| | | | AYLQWSSLKAS | | | PEDFAVYYCQ | | |
| | | | D | | | QYGSSPTFGGG | | |
| | | | TALYYCARTRE | | | TKVEIK | | |
| | | | GYFDYWGQGT | | | | | |
| | | | LVTVSS | | | | | |
| | 11E7 | GPC3 | EVQLVQSGAEV | 8109 | 9038, | EIVLTQSPGTLS | 8206 | 9285, |
| | | | KKPGESLKISCK | | 9039, | LSPGERATLSC | | 9182, |
| | | | GSGYSFTNYWI | | 9037 | RASQSVSSSYL | | 9284 |
| | | | AWVRQMPGKG | | | AWYQQKPGQA | | |
| | | | LEWMGIIYPGD | | | PRLLIYGASSRA | | |
| | | | SDTRYSPSFQG | | | TGIPDRFSGSGS | | |
| | | | QVTISADKSIRT | | | GTDFTLTISRLE | | |
| | | | AYLQWSSLKAS | | | PEDFAVYYCQ | | |
| | | | D | | | QYGSSPTFGGG | | |
| | | | TAMYYCARTR | | | TKVEIK | | |
| | | | EGYFDYWGQG | | | | | |
| | | | TLVTVSS | | | | | |
| | 16D10 | GPC3 | EVQLVQSGADV | 8110 | 9040, | EILLTQSPGTLS | 8207 | 9285, |
| | | | TKPGESLKISCK | | 9039, | LSPGERATLSC | | 9182, |
| | | | VSGYRFTNYWI | | 9041 | RASQSVSSSYL | | 9284 |
| | | | GWMRQMSGK | | | AWYQQKPGQA | | |
| | | | GLEWMGIIYPG | | | PRLLIYGASSRA | | |
| | | | DSDTRYSPSFQ | | | TGIPDRFSGSGS | | |
| | | | GHVTISADKSIN | | | GTDFTLTISRLE | | |
| | | | TAYLRWSSLKA | | | PEDFAVYYCQ | | |
| | | | SD | | | QYGSSPTFGQG | | |
| | | | TAIYYCARTRE | | | TKVEIK | | |
| | | | GFFDYWGQGT | | | | | |
| | | | PVTVSS | | | | | |
| AMG-595 | | HER1 | QVQLVESGGGV | 8111 | 9042, | DTVMTQTPLSS | 8208 | 9286, |
| | | (EGFR) | VQSGRSLRLSC | | 9043, | HVTLGQPASISC | | 9287, |
| | | | AASGFTFRNY | | 9044 | RSSQSLVHSDG | | 9288 |
| | | | GMHWVRQAPG | | | NTYLSWLQQRP | | |
| | | | KGLEWVAVIW | | | GQPPRLLIYRIS | | |
| | | | YDGSDKYYAD | | | RRFSGVPDRFS | | |
| | | | SVRGRFTISRD | | | GSGAGTDFTLEI | | |
| | | | NSKNTLYLQM | | | SRVEAEDVGVY | | |
| | | | NSLRAEDTAVY | | | YCMQSTHVPR | | |
| | | | YCARDGYDILT | | | TFGQGTKVEIK | | |
| | | | GNPRDFDYWG | | | | | |
| | | | QGTLVTVSS | | | | | |
| Erubitux ™ | cetut- | HER1 | QVQLKQSGPGL | 8112 | 9045, | DILLTQSPVILS | 8209 | 9289, |
| | ximab | (EGFR) | VQPSQSLSITCT | | 9046, | VSPGERVSFSCR | | 9290, |
| | | | VSGFSLTNYGV | | 9047 | ASQSIGTNIHW | | 9291 |
| | | | HWVRQSPGKG | | | YQQRTNGSPRL | | |
| | | | LEWLGVIWSG | | | LIKYASESISGIP | | |
| | | | GNTDYNTPFTS | | | SRFSGSGSGTDF | | |
| | | | RLSINKDNSKS | | | TLSINSVESEDI | | |
| | | | QVFFKMNSLQS | | | ADYYCQQNNN | | |
| | | | NDTAIYYCARA | | | WPTTFGAGTK | | |
| | | | LTYYDYEFAY | | | LELK | | |
| | | | WGQGTLVTVS | | | | | |
| | | | A | | | | | |
| GA201 | Imgatu- | HER1 | QVQLVQSGAEV | 8113 | 9048, | DIQMTQSPSSLS | 8210 | 9292, |
| | zumab | (EGFR) | KKPGSSVKVSC | | 9049, | ASVGDRVTITC | | 9293, |
| | | | KASGFTFTDYK | | 9050 | RASQGINNYLN | | 9294 |
| | | | IHWVRQAPGQ | | | WYQQKPGKAP | | |
| | | | GLEWMGYFNP | | | KRLIYNTNNLQ | | |
| | | | NSGYSTYAQK | | | TGVPSRFSGSGS | | |
| | | | FQGRVTITADK | | | GTEFTLTISSLQ | | |
| | | | STSTAYMELSS | | | PEDFATYYCLQ | | |
| | | | LRSEDTAVYYC | | | HNSFPTFGQGT | | |
| | | | ARLSPGGYYV | | | KLEIK | | |
| | | | MDAWGQGTTV | | | | | |
| | | | TVSS | | | | | |
| Humax | zalut- | HER1 | QVQLVESGGGV | 8114 | 9051, | AIQLTQSPSSLS | 8211 | 9295, |
| | umumab | (EGFR) | VQPGRSLRLSC | | 9052, | ASVGDRVTITC | | 9228, |
| | | | AASGFTFSTYG | | 9053 | RASQDISSALV | | 9296 |
| | | | MHWVRQAPGK | | | WYQQKPGKAP | | |
| | | | GLEWVAVIWD | | | KLLIYDASSLES | | |
| | | | DGSYKYYGDS | | | GVPSRFSGSESG | | |
| | | | VKGRFTISRDN | | | TDFTLTISSLQP | | |
| | | | SKNTLYLQMNS | | | EDFATYYCQQF | | |
| | | | LRAEDTAVYYC | | | NSYPLTFGGGT | | |
| | | | ARDGITMVRG | | | KVEIK | | |
| | | | VMKDYFDYW | | | | | |
| | | | GQGTLVTVSS | | | | | |
| IMC-11F8 | necit- | HER1 | QVQLQESGPGL | 8115 | 9054, | EIVMTQSPATLS | 8212 | 9202, |
| | umumab | (EGFR) | VKPSQTLSLTCT | | 9055, | LSPGERATLSC | | 9203, |
| | | | VSGGSISSGDY | | 9056 | RASQSVSSYLA | | 9297 |
| | | | YWSWIRQPPGK | | | WYQQKPGQAP | | |
| | | | GLEWIGYIYYS | | | RLLIYDASNRA | | |
| | | | GSTDYNPSLKS | | | TGIPARFSGSGS | | |
| | | | RVTMSVDTSKN | | | GTDFTLTISSLE | | |
| | | | QFSLKVNSVTA | | | PEDFAVYYCHQ | | |
| | | | ADTAVYYCAR | | | YGSTPLTFGGG | | |
| | | | VSIFGVGTFDY | | | TKAEIK | | |
| | | | WGQGTLVTVSS | | | | | |
| MM-151 | P1X | HER1 | QVQLVQSGAEV | 8116 | 9057, | DIQMTQSPSTLS | 8213 | 9298, |
| | | (EGFR) | KKPGSSVKVSC | | 9058, | ASVGDRVTITC | | 9228, |
| | | | KASGGTFSSYAI | | 9059 | RASQSISSWWA | | 9299 |
| | | | SWVRQAPGQG | | | WYQQKPGKAP | | |
| | | | LEWMGSIIPIFG | | | KLLIYDASSLES | | |
| | | | TVNYAQKFQG | | | GVPSRFSGSGS | | |
| | | | RVTITADESTST | | | GTEFTLTISSLQ | | |
| | | | AYMELSSLRSE | | | PDDFATYYCQQ | | |
| | | | DTAVYYCARD | | | YHAHPTTFGG | | |
| | | | PSVNLYWYFD | | | GTKVEIK | | |
| | | | LWGRGTLVTVS | | | | | |
| | | | S | | | | | |
| MM-151 | P2X | HER1 | QVQLVQSGAEV | 8117 | 9057, | DIVMTQSPDSL | 8214 | 9300, |
| | | (EGFR) | KKPGSSVKVSC | | 9060, | AVSLGERATIN | | 9241, |
| | | | KASGGTFGSYA | | 9061 | CKSSQSVLYSP | | 9301 |
| | | | ISWVRQAPGQG | | | NNKNYLAWYQ | | |
| | | | LEWMGSIIPIFG | | | QKPGQPPKLLIY | | |
| | | | AANPAQKSQG | | | WASTRESGVP | | |
| | | | RVTITADESTST | | | DRFSGSGSGTD | | |
| | | | AYMELSSLRSE | | | FTLTISSLQAED | | |
| | | | DTAVYYCAKM | | | VAVYYCQQYY | | |
| | | | GRGKVAFDIW | | | GSPITFGGGTK | | |
| | | | GQGTMVTVSS | | | VEIK | | |
| MM-151 | P3X | HER1 | QVQLVQSGAEV | 8118 | 9062, | EIVMTQSPATLS | 8215 | 9302, |
| | | (EGFR) | KKPGASVKVSC | | 9063, | VSPGERATLSC | | 9303, |
| | | | KASGYAFTSYG | | 9064 | RASQSVSSNLA | | 9304 |
| | | | INWVRQAPGQ | | | WYQQKPGQAP | | |
| | | | GLEWMGWISA | | | RLLIYGASTRA | | |
| | | | YNGNTYYAQK | | | TGIPARFSGSGS | | |
| | | | LRGRVTMTTD | | | GTEFTLTISSLQ | | |
| | | | TSTSTAYMELR | | | SEDFAVYYCQD | | |
| | | | SLRSDDTAVYY | | | YRTWPRRVFG | | |
| | | | CARDLGGYGS | | | GGTKVEIK | | |
| | | | GSVPFDPWGQ | | | | | |
| | | | GTLVTVSS | | | | | |
| TheraCIM | nimot- | HER1 | QVQLQQSGAEV | 8119 | 9065, | DIQMTQSPSSLS | 8216 | 9305, |
| | uzumab | (EGFR) | KKPGSSVKVSC | | 9066, | ASVGDRVTITC | | 9281, |
| | | | KASGYTFTNYY | | 9067 | RSSQNIVHSNG | | 9306 |
| | | | IYWVRQAPGQ | | | NTYLDWYQQT | | |
| | | | GLEWIGGINPT | | | PGKAPKLLIYK | | |
| | | | SGGSNFNEKFK | | | VSNRFSGVPSR | | |
| | | | TRVTITADESST | | | FSGSGSGTDFTF | | |
| | | | TAYMELSSLRS | | | TISSLQPEDIAT | | |
| | | | EDTAFYFCTRQ | | | YYCFQYSHVP | | |
| | | | GLWFDSDGRG | | | WTFGQGTKLQI | | |
| | | | FDFWGQGTTV | | | T | | |
| | | | TVSS | | | | | |
| Vectibix ™ | panit- | HER1 | QVQLQESGPGL | 8120 | 9068, | DIQMTQSPSSLS | 8217 | 9307, |
| | umimab | (EGFR) | VKPSETLSLTCT | | 9069, | ASVGDRVTITC | | 9218, |
| | | | VSGGSVSSGDY | | 9070 | QASQDISNYLN | | 9308 |
| | | | YWTWIRQSPGK | | | WYQQKPGKAP | | |
| | | | GLEWIGHIYYS | | | KLLIYDASNLET | | |
| | | | GNTNYNPSLKS | | | GVPSRFSGSGS | | |
| | | | RLTISIDTSKTQ | | | GTDFTFTISSLQ | | |
| | | | FSLKLSSVTAA | | | PEDIATYFCQH | | |
| | | | DTAIYYCVRDR | | | FDHLPLAFGGG | | |
| | | | VTGAFDIWGQ | | | TKVEIK | | |
| | | | GTMVTVSS | | | | | |
| 07D06 | | HER1 | QIQLVQSGPEL | 8121 | 9071, | DVVMTQTPLSL | 8218 | 9309, |
| | | (EGFR) | KKPGETVKISC | | 9072, | PVSLGDQASISC | | 9310, |
| | | | KASGYTFTEYP | | 9073 | RSSQSLVHSNG | | 9311 |
| | | | IHWVKQAPGK | | | NTYLHWYLQK | | |
| | | | GFKWMGMIYT | | | PGQSPKLLIYK | | |
| | | | DIGKPTYAEEF | | | VSNRFSGVPDR | | |
| | | | KGRFAFSLETS | | | FSGSGSGTDFTL | | |
| | | | ASTAYLQINNL | | | KISRVEAEDLG | | |
| | | | KNEDTATYFCV | | | VYFCSQSTHVP | | |
| | | | RDRYDSLFDY | | | WTFGGGTKLEI | | |
| | | | WGQGTTLTVSS | | | K | | |
| 12D03 | | HER1 | EMQLVESGGGF | 8122 | 9074, | DVVMTQTPLSL | 8219 | 9280, |
| | | (EGFR) | VKPGGSLKLSC | | 9075, | PVSLGDQASISC | | 9281, |
| | | | AASGFAFSHYD | | 9076 | RSSQSLVHSNG | | 9312 |
| | | | MSWVRQTPKQ | | | NTYLHWYLQK | | |
| | | | RLEWVAYIASG | | | PGQSPKLLIYK | | |
| | | | GDITYYADTV | | | VSNRFSGVPDR | | |
| | | | KGRFTISRDNA | | | FSGSGSGTDFTL | | |
| | | | QNTLYLQMSSL | | | KISRVEAEDLG | | |
| | | | KSEDTAMFYCS | | | VYFCSQSTHVL | | |
| | | | RSSYGNNGDA | | | TFGSGTKLEIK | | |
| | | | LDFWGQGTSV | | | | | |
| | | | TVSS | | | | | |
| | C1 | HER2 | QVQLVESGGGL | 8123 | 9077, | QSPSFLSAFVGD | 8220 | 9313, |
| | | | VQPGGSLRLSC | | 9078, | RITITCRASPGI | | 9314, |
| | | | AASGFTFSSYA | | 9079 | RNYLAWYQQK | | 9315 |
| | | | MGWVRQAPGK | | | PGKAPKLLIYA | | |
| | | | GLEWVSSISGSS | | | ASTLQSGVPSR | | |
| | | | RYIYYADSVKG | | | FSGSGSGTDFTL | | |
| | | | RFTISRDNSKNT | | | TISSLQPEDFAT | | |
| | | | LYLQMNSLRAE | | | YYCQQYNSYP | | |
| | | | DTAVYYCAKM | | | LSFGGGTKVEI | | |
| | | | DASGSYFNFW | | | K | | |
| | | | GQGTLVTVSS | | | | | |
| Erbicin | | HER2 | QVQLLQSAAEV | 8124 | 9080, | QAVVTQEPSFS | 8221 | 9316, |
| | | | KKPGESLKISCK | | 9039, | VSPGGTVTLTC | | 9317, |
| | | | GSGYSFTSYWI | | 9081 | GLSSGSVSTSY | | 9318 |
| | | | GWVRQMPGKG | | | YPSWYQQTPG | | |
| | | | LEWMGIIYPGD | | | QAPRTLIYSTNT | | |
| | | | SDTRYSPSFQG | | | RSSGVPDRFSG | | |
| | | | QVTISADKSIST | | | SILGNKAALTIT | | |
| | | | AYLQWSSLKAS | | | GAQADDESDY | | |
| | | | DTAVYYCARW | | | YCVLYMGSGQ | | |
| | | | RDSPLWGQGT | | | YVFGGGTKLTV | | |
| | | | LVTVSS | | | L | | |
| Herceptin | trast- | HER2 | EVQLVESGGGL | 8125 | 9082, | DIQMTQSPSSLS | 8222 | 9319, |
| | uzumab | | VQPGGSLRLSC | | 9083, | ASVGDRVTITC | | 9320, |
| | | | AASGFNIKDTY | | 9084 | RASQDVNTAV | | 9321 |
| | | | IHWVRQAPGKG | | | AWYQQKPGKA | | |
| | | | LEWVARIYPTN | | | PKLLIYSASFLY | | |
| | | | GYTRYADSVK | | | SGVPSRFSGSRS | | |
| | | | GRFTISADTSKN | | | GTDFTLTISSLQ | | |
| | | | TAYLQMNSLRA | | | PEDFATYYCQQ | | |
| | | | EDTAVYYCSR | | | HYTTPPTFGQG | | |
| | | | WGGDGFYAM | | | TKVEIK | | |
| | | | DYWGQGTLVT | | | | | |
| | | | VSS | | | | | |
| MAGH22 | marget- | HER2 | QVQLQQSGPEL | 8126 | 9082, | DIVMTQSHKFM | 8223 | 9319, |
| | uximab | | VKPGASLKLSC | | 9083, | STSVGDRVSITC | | 9320, |
| | | | TASGFNIKDTY | | 9084 | KASQDVNTAV | | 9321 |
| | | | IHWVKQRPEQG | | | AWYQQKPGHS | | |
| | | | LEWIGRIYPTN | | | PKLLIYSASFRY | | |
| | | | GYTRYDPKFQD | | | TGVPDRFTGSR | | |
| | | | KATITADTSSNT | | | SGTDFTFTISSV | | |
| | | | AYLQVSRLTSE | | | QAEDLAVYYC | | |
| | | | DTAVYYCSRW | | | QQHYTTPPTFG | | |
| | | | GGDGFYAMDY | | | GGTKVEIK | | |
| | | | WGQGASVTVSS | | | | | |
| MM-302 | F5 | HER2 | QVQLVESGGGL | 8127 | 9085, | QSVLTQPPSVS | 8224 | 9322, |
| | | | VQPGGSLRLSC | | 9086, | GAPGQRVTISC | | 9323, |
| | | | AASGFTFRSYA | | 9087 | TGSSSNIGAGY | | 9324 |
| | | | MSWVRQAPGK | | | GVHWYQQLPG | | |
| | | | GLEWVSAISGR | | | TAPKLLIYGNT | | |
| | | | GDNTYYADSV | | | NRPSGVPDRFS | | |
| | | | KGRFTISRDNS | | | GFKSGTSASLAI | | |
| | | | KNTLYLQMNSL | | | TGLQAEDEADY | | |
| | | | RAEDTAVYYC | | | YCQFYDSSLSG | | |
| | | | AKMTSNAFAF | | | WVFGGGTKLT | | |
| | | | DYWGQGTLVT | | | VL | | |
| | | | VSS | | | | | |
| Perjeta | pert- | HER2 | EVQLVESGGGL | 8128 | 9088, | DIQMTQSPSSLS | 8225 | 9325, |
| | uzumab | | VQPGGSLRLSC | | 9089, | ASVGDRVTITC | | 9320, |
| | | | AASGFTFTDYT | | 9090 | KASQDVSIGVA | | 9326 |
| | | | MDWVRQAPGK | | | WYQQKPGKAP | | |
| | | | GLEWVADVNP | | | KLLIYSASYRYT | | |
| | | | NSGGSIYNQRF | | | GVPSRFSGSGS | | |
| | | | KGRFTLSVDRS | | | GTDFTLTISSLQ | | |
| | | | KNTLYLQMNSL | | | PEDFATYYCQQ | | |
| | | | RAEDTAVYYC | | | YYIYPYTFGQG | | |
| | | | ARNLGPSFYFD | | | TKVEIK | | |
| | | | YWGQGTLVTV | | | | | |
| | | | SS | | | | | |
| MM-121/ | | HER3 | EVQLLESGGGL | 8129 | 9091, | QSALTQPASVS | 8226 | 9327, |
| SAR256212 | | | VQPGGSLRLSC | | 9092, | GSPGQSITISCT | | 9328. |
| | | | AASGFTFSHYV | | 9093 | GTSSDVGSYNV | | 9329 |
| | | | MAWVRQAPGK | | | VSWYQQHPGK | | |
| | | | GLEWVSSISSSG | | | APKLIIYEVSQR | | |
| | | | GWTLYADSVK | | | PSGVSNRFSGS | | |
| | | | GRFTISRDNSK | | | KSGNTASLTISG | | |
| | | | NTLYLQMNSLR | | | LQTEDEADYYC | | |
| | | | AEDTAVYYCTR | | | CSYAGSSIFVIF | | |
| | | | GLKMATIFDY | | | GGGTKVTVL | | |
| | | | WGQGTLVTVSS | | | | | |
| MEHD7945A | Duligo- | HER1 | EVQLVESGGGL | 8130 | 9094, | DIQMTQSPSSLS | 8227 | 9330, |
| | tumab | (EGFR)/ | VQPGGSLRLSC | | 9095, | ASVGDRVTITC | | 9331, |
| | | HER3 | AASGFTLSGDW | | 9096 | RASQNIATDVA | | 9332 |
| | | | IHWVRQAPGK | | | WYQQKPGKAP | | |
| | | | GLEWVGEISAA | | | KLLIYSASFLYS | | |
| | | | GGYTDYADSV | | | GVPSRFSGSGS | | |
| | | | KGRFTISADTS | | | GTDFTLTISSLQ | | |
| | | | KNTAYLQMNS | | | PEDFATYYCQQ | | |
| | | | LRAEDTAVYYC | | | SEPEPYTFGQG | | |
| | | | ARESRVSFEAA | | | TKVEIK | | |
| | | | MDYWGQGTLV | | | | | |
| | | | TVSS | | | | | |
| MM-111 | | HER2/3 | QVQLQESGGGL | 8131 | 9097, | QSALTQPASVS | 8228 | 9333, |
| | | | VKPGGSLRLSC | | 9098, | GSPGQSITISCT | | 9334, |
| | | | AASGFTFSSYW | | 9099 | GTSSDVGGYN | | 9335 |
| | | | MSWVRQAPGK | | | FVSWYQQHPG | | |
| | | | GLEWVANINR | | | KAPKLMIYDVS | | |
| | | | DGSASYYVDSV | | | DRPSGVSDRFS | | |
| | | | KGRFTISRDDA | | | GSKSGNTASLII | | |
| | | | KNSLYLQMNSL | | | SGLQADDEADY | | |
| | | | RAEDTAVYYC | | | YCSSYGSSSTH | | |
| | | | ARDRGVGYFD | | | VIFGGGTKVTV | | |
| | | | LWGRGTLVTVS | | | L | | |
| | | | S | | | | | |
| MM-111 | | HER2/3 | QVQLVQSGAEV | 8132 | 9035, | QSVLTQPPSVS | 8229 | 9336, |
| | | | KKPGESLKISCK | | 9100, | AAPGQ | | 9337, |
| | | | GSGYSFTSYWI | | 9101 | KVTISCSGSSSN | | 9338 |
| | | | AWVRQMPGKG | | | IGNNYVSWYQ | | |
| | | | LEYMGLIYPGD | | | QLPGTAPKLLIY | | |
| | | | SDTKYSPSFQG | | | DHTNRPAGVP | | |
| | | | QVTISVDKSVST | | | DRFSGSKSGTS | | |
| | | | AYLQWSSLKPS | | | ASLAISGFRSED | | |
| | | | DSAVYFCARHD | | | EADYYCASWD | | |
| | | | VGYCTDRTCA | | | YTLSGWVFGG | | |
| | | | KWPEWLGVW | | | GTKLTVL | | |
| | | | GQGTLVTVSS | | | | | |
| | Hu3S193 | Lewis-Y | EVQLVESGGGV | 8133 | 9102, | DIQMTQSPSSLS | 8230 | 9339, |
| | | | VQPGRSLRLSC | | 9103, | ASVGDRVTITC | | 9281, |
| | | | STSGFTFSDYY | | 9104 | RSSQRIVHSNG | | 9340 |
| | | | MYWVRQAPGK | | | NTYLEWYQQT | | |
| | | | GLEWVAYMSN | | | PGKAPKLLIYK | | |
| | | | VGAITDYPDTV | | | VSNRFSGVPSR | | |
| | | | KGRFTISRDNS | | | FSGSGSGTDFTF | | |
| | | | KNTLFLQMDSL | | | TISSLQPEDIAT | | |
| | | | RPEDTGVYFCA | | | YYCFQGSHVPF | | |
| | | | RGTRDGSWFA | | | TFGQGTKLQIT | | |
| | | | YWGQGTPVTV | | | | | |
| | | | SS | | | | | |
| BAY 94- | anetumab | Mesothelin | QVELVQSGAEV | 8134 | 9105, | DIALTQPASVSG | 8231 | 9341, |
| 9343 | ravtan- | | KKPGESLKISCK | | 9106, | SPGQSITISCTGT | | 9342, |
| | sine | | GSGYSFTSYWI | | 9107 | SSDIGGYNSVS | | 9343 |
| | | | GWVRQAPGKG | | | WYQQHPGKAP | | |
| | | | LEWMGIIDPGD | | | KLMIYGVNNRP | | |
| | | | SRTRYSPSFQG | | | SGVSNRFSGSK | | |
| | | | QVTISADKSIST | | | SGNTASLTISGL | | |
| | | | AYLQWSSLKAS | | | QAEDEADYYCS | | |
| | | | DTAMYYCARG | | | SYDIESATPVF | | |
| | | | QLYGGTYMDG | | | GGGTKLTVL | | |
| | | | WGQGTLVTVSS | | | | | |
| | SS1 | Mesothelin | QVQLQQSGPEL | 8135 | | DIELTQSPAIMS | 8232 | |
| | | | EKPGASVKISC | | | ASPGEKVTMTC | | |
| | | | KASGYSFTGYT | | | SASSSVSYMHW | | |
| | | | MNWVKQSHGK | | | YQQKSGTSPKR | | |
| | | | SLEWIGLITPYN | | | WIYDTSKLASG | | |
| | | | GASSYNQKFRG | | | VPGRFSGSGSG | | |
| | | | KATLTVDKSSS | | | NSYSLTISSVEA | | |
| | | | TAYMDLLSLTS | | | EDDATYYCQQ | | |
| | | | EDSAVYFCARG | | | WSGYPLTFGAG | | |
| | | | GYDGRGFDYW | | | TKLEIK | | |
| | | | GQGTTVTVSS | | | | | |
| | | Mesothelin | QVYLVESGGGV | 8136 | 9108, | EIVLTQSPATLS | 8233 | 9202, |
| | | | VQPGRSLRLSC | | 9109, | LSPGERATLSC | | 9203, |
| | | | AASGITFSIYG | | 9110 | RASQSVSSYLA | | 9233 |
| | | | MHWVRQAPGK | | | WYQQKPGQAP | | |
| | | | GLEWVAVIWY | | | RLLIYDASNRA | | |
| | | | DGSHEYYADS | | | TGIPARFSGSGS | | |
| | | | VKGRFTISRDN | | | GTDFTLTISSLE | | |
| | | | SKNTLYLLMNS | | | PEDFAVYYCQQ | | |
| | | | LRAED | | | RSNWPLTFGG | | |
| | | | TAVYYCARDG | | | GTKVEIK | | |
| | | | DYYDSGSPLDY | | | | | |
| | | | WGQGTLVTVSS | | | | | |
| | | Mesothelin | QVHLVESGGGV | 8137 | 9111, | EIVLTQSPATLS | 8233 | 9202, |
| | | | VQPGRSLRLSC | | 9112, | LSPGERATLSC | | 9203, |
| | | | VASGITFRIYG | | 9110 | RASQSVSSYLA | | 9233 |
| | | | MHWVRQAPGK | | | WYQQKPGQAP | | |
| | | | GLEWVAVLWY | | | RLLIYDASNRA | | |
| | | | DGSHEYYADS | | | TGIPARFSGSGS | | |
| | | | VKGRFTISRDN | | | GTDFTLTISSLE | | |
| | | | SKNTLYLQMNS | | | PEDFAVYYCQQ | | |
| | | | LRAED | | | RSNWPLTFGG | | |
| | | | TAIYYCARDGD | | | GTKVEIK | | |
| | | | YYDSGSPLDY | | | | | |
| | | | WGQGTLVTVSS | | | | | |
| | | Mesothelin | EVHLVESGGGL | 8138 | 9113, | EIVLTQSPGTLS | 8234 | 9285, |
| | | | VQPGGSLRLSC | | 9114, | LSPGERATLSC | | 9182, |
| | | | AASGFTFSRYW | | 9115 | RASQSVSSSYL | | 9344 |
| | | | MSWVRQAQGK | | | AWYQQKPGQA | | |
| | | | GLEWVASIKQA | | | PRLLIYGASSRA | | |
| | | | GSEKTYVDSV | | | TGIPDRFSGSGS | | |
| | | | KGRFTISRDNA | | | GTDFTLTISRLE | | |
| | | | KNSLSLQMNSL | | | PEDFAVYYCQ | | |
| | | | RAED | | | QYGSSQYTFGQ | | |
| | | | TAVYYCAREG | | | GTKLEIK | | |
| | | | AYYYDSASYYP | | | | | |
| | | | YYYYYSMDVW | | | | | |
| | | | GQGTTVTVSS | | | | | |
| MORAb- | amat- | Mesothelin | QVQLQQSGPEL | 8139 | 9116, | DIELTQSPAIMS | 8235 | 9345, |
| 009 | uximab | | EKPGASVKISC | | 9117, | ASPGEKVTMTC | | 8909, |
| | | | KASGYSFTGYT | | 9118 | SASSSVSYMH | | 9346 |
| | | | MNWVKQSHGK | | | WYQQKSGTSPK | | |
| | | | SLEWIGLITPYN | | | RWIYDTSKLAS | | |
| | | | GASSYNQKFR | | | GVPGRFSGSGS | | |
| | | | GKATLTVDKSS | | | GNSYSLTISSVE | | |
| | | | STAYMDLLSLT | | | AEDDATYYCQ | | |
| | | | SEDSAVYFCAR | | | QWSKHPLTFG | | |
| | | | GGYDGRGFDY | | | SGTKVEIK | | |
| | | | WGSGTPVTVSS | | | | | |
| hPAM4 | | MUC-1 | EVQLQESGPEL | 8140 | 9119, | DIVMTQSPAIM | 8236 | 9347, |
| | | | VKPGASVKMSC | | 9120, | SASPGEKVTMT | | 9348, |
| | | | KASGYTFPSYV | | 9121 | CSASSSVSSSYL | | 9349 |
| | | | LHWVKQKPGQ | | | YWYQQKPGSSP | | |
| | | | GLEWIGYINPY | | | KLWIYSTSNLA | | |
| | | | NDGTQYNEKF | | | SGVPARFSGSG | | |
| | | | KGKATLTSDKS | | | SGTSYSLTISSM | | |
| | | | SSTAYMELSRL | | | EAEDAASYFCH | | |
| | | | TSED | | | QWNRYPYTFG | | |
| | | | SAVYYCARGF | | | GGTKLEIK | | |
| | | | GGSYGFAYWG | | | | | |
| | | | QGTLITVSA | | | | | |
| hPAM4- | cliva- | MUC1 | QVQLQQSGAEV | 8141 | 9119, | DIQLTQSPSSLS | 8237 | 9347, |
| Cide | tuzumab | | KKFGASVKVSC | | 9122, | ASVGDRVTMT | | 9348, |
| | | | EASGYTFPSYV | | 9121 | CSASSSVSSSYL | | 9349 |
| | | | LHWVKQAPGQ | | | YWYQQKPGKA | | |
| | | | GLEWIGYINPY | | | PKLWIYSTSNL | | |
| | | | NDGTQTNKKF | | | ASGVPARFSGS | | |
| | | | KGKATLTRDTS | | | GSGTDFTLTISS | | |
| | | | INTAYMELSRL | | | LQPEDSASYFC | | |
| | | | RSDDTAVYYCA | | | HQWNRYPYTF | | |
| | | | RGFGGSYGFA | | | GGGTRLEIK | | |
| | | | YNGQGTLVTVS | | | | | |
| | | | S | | | | | |
| SAR566658 | huDS6v1. | MUC1 | QAQLQVSGAEV | 8142 | 8947, | EIVLTQSPATMS | 8238 | 9350, |
| | 01 | | VKPGASVKMSC | | 9123, | ASPGERVTITCS | | 9351, |
| | | | KASGYTFTSYN | | 9124 | AHSSVSFMHW | | 9352 |
| | | | MHWVKQTPGQ | | | FQQKPGTSPKL | | |
| | | | GLEWIGYIYPG | | | WIYSTSSLASG | | |
| | | | NGATNYNQKF | | | VPARFGGSGSG | | |
| | | | QGKATLTADTS | | | TSYSLTISSMEA | | |
| | | | SSTAYMQISSLT | | | EDAATYYCQQ | | |
| | | | SEDSAVYFCAR | | | RSSFPLTFGAG | | |
| | | | GDSVPFAYWG | | | TKLELK | | |
| | | | QGTLVTVSA | | | | | |
| Theragyn | Pemt- | MUC1 | QVQLQQSGAEL | 8143 | 9125, | DIVMSQSPSSLA | 8239 | 9353, |
| | umomab | | MKPGASVKISC | | 9126, | VSVGEKVTMSC | 9354, | |
| | muHMFG1 | | KATGYTFSAY | | 9127 | KSSQSLLYSSN | 9355 | |
| | | | WIEWVKQRPG | | | QKIYLAWYQQ | | |
| | | | HGLEWIGEILP | | | KPGQSPKLLIY | | |
| | | | GSNNSRYNEKF | | | WASTRESGVPD | | |
| | | | KGKATFTADTS | | | RFTGGGSGTDF | | |
| | | | SNTAYMQLSSL | | | TLTISSVKAEDL | | |
| | | | TSEDSAVYYCS | | | AVYYCQQYYR | | |
| | | | RSYDFAWFAY | | | YPRTFGGGTKL | | |
| | | | WGQGTPVTVS | | | EIK | | |
| | | | A | | | | | |
| Therex | Sont- | MUC1 | QVQLVQSGAEV | 8144 | 9125, | DIQMTQSPSSLS | 8240 | 9353, |
| | uzumab | | KKPGASVKVSC | | 9126, | ASVGDRVTITC | | 9354, |
| | huHMFG1 | | KASGYTFSAY | | 9127 | KSSQSLLYSSN | | 9355 |
| | AS1402 | | WIEWVRQAPG | | | QKIYLAWYQQ | | |
| | R1150 | | KGLEWVGEILP | | | KPGKAPKLLIY | | |
| | | | GSNNSRYNEKF | | | WASTRESGVPS | | |
| | | | KGRVTVTRDTS | | | RFSGSGSGTDFT | | |
| | | | TNTAYMELSSL | | | FTISSLQPEDIAT | | |
| | | | RSEDTAVYYCA | | | YYCQQYYRYP | | |
| | | | RSYDFAWFAY | | | RTFGQGTKVEI | | |
| | | | WGQGTLVTVSS | | | K | | |
| MDX-1105 | | PD-L1 | QVQLVQSGAEV | 8145 | 9128, | EIVLTQSPATLS | 8241 | 9202, |
| or BMS- | | | KKPGSSVKVSC | | 9129, | LSPGERATLSC | | 9203, |
| 936559 | | | KTSGDTFSTYAI | | 9130 | RASQSVSSYLA | | 9356 |
| | | | SWVRQAPGQG | | | WYQQKPGQAP | | |
| | | | LEWMGGIIPIF | | | RLLIYDASNRA | | |
| | | | GKAHYAQKFQ | | | TGIPARFSGSGS | | |
| | | | GRVTITADESTS | | | GTDFTLTISSLE | | |
| | | | TAYMELSSLRS | | | PEDFAVYYCQQ | | |
| | | | EDTAVYFCARK | | | RSNWPTFGQG | | |
| | | | FHFVSGSPFGM | | | TKVEIK | | |
| | | | DVWGQGTTVT | | | | | |
| | | | VSS | | | | | |
| MEDI- | durva- | PD-L1 | EVQLVESGGGL | 8146 | 9131, | EIVLTQSPGTLS | 8242 | 9357, |
| 4736 | lumab | | VQPGGSLRLSC | | 9132, | LSPGERATLSCR | | 9218, |
| | | | AASGFTFSRY | | 9133 | ASQRVSSSYLA | | 9358 |
| | | | WMSWVRQAPG | | | WYQQKPGQAP | | |
| | | | KGLEWVANIK | | | RLLIYDASSRAT | | |
| | | | QDGSEKYYVD | | | GIPDRFSGSGSG | | |
| | | | SVKGRFTISRDN | | | TDFTLTISRLEP | | |
| | | | AKNSLYLQMNS | | | EDFAVYYCQQ | | |
| | | | LRAEDTAVYYC | | | YGSLPWTFGQ | | |
| | | | AREGGWFGEL | | | GTKVEIK | | |
| | | | AFDYWGQGTL | | | | | |
| | | | VTVSS | | | | | |
| MPDL3280A | atezol- | PD-L1 | EVQLVESGGGL | 8147 | 9134, | DIQMTQSPSSLS | 8243 | 9359, |
| | izumab | | VQPGGSLRLSC | | 9135, | ASVGDRVTITC | | 9320, |
| | | | AASGFTFSDSW | | 9136 | RASQDVSTAVA | | 9360 |
| | | | IHWVRQAPGKG | | | WYQQKPGKAP | | |
| | | | LEWVAWISPY | | | KLLIYSASFLYS | | |
| | | | GGSTYYADSV | | | GVPSRFSGSGS | | |
| | | | KGRFTISADTSK | | | GTDFTLTISSLQ | | |
| | | | NTAYLQMNSLR | | | PEDFATYYCQQ | | |
| | | | AEDTAVYYCA | | | YLYHPATFGQ | | |
| | | | RRHWPGGFDY | | | GTKVEIK | | |
| | | | WGQGTLVTVSS | | | | | |
| MSB00107 | avelumab | PD-L1 | EVQLLESGGGL | 8148 | 9137, | QSALTQPASVS | 8244 | 9361, |
| 18C | | | VQPGGSLRLSC | | 9138, | GSPGQSITISCT | | 9362, |
| | | | AASGFTFSSYI | | 9139 | GTSSDVGGYN | | 9363 |
| | | | MMWVRQAPGK | | | YVSWYQQHPG | | |
| | | | GLEWVSSIYPS | | | KAPKLMIYDVS | | |
| | | | GGITFYADTVK | | | NRPSGVSNRFS | | |
| | | | GRFTISRDNSKN | | | GSKSGNTASLTI | | |
| | | | TLYLQMNSLRA | | | SGLQAEDEADY | | |
| | | | EDTAVYYCARI | | | YCSSYTSSSTR | | |
| | | | KLGTVTTVDY | | | VFGTGTKVTVL | | |
| | | | WGQGTLVTVSS | | | | | |
| MLN591 | | PSMA | EVQLVQSGPEV | 8149 | 9140, | DIQMTQSPSSLS | 8245 | 9364, |
| | | | KKPGATVKISC | | 9141, | TSVGDRVTLTC | | 9365, |
| | | | KTSGYTFTEYT | | 9142 | KASQDVGTAV | | 9232 |
| | | | IHWVKQAPGK | | | DWYQQKPGPSP | | |
| | | | GLEWIGNINPN | | | KLLIYWASTRH | | |
| | | | NGGTTYNQKF | | | TGIPSRFSGSGS | | |
| | | | EDKATLTVDKS | | | GTDFTLTISSLQ | | |
| | | | TDTAYMELSSL | | | PEDFADYYCQQ | | |
| | | | RSEDTAVYYCA | | | YNSYPLTFGPG | | |
| | | | AGWNFDYWG | | | TKVDIK | | |
| | | | QGTLLTVSS | | | | | |
| MT112 | pasot- | PSMA | QVQLVESGGGL | 8150 | 9143, | DIQMTQSPSSLS | 8246 | 9366, |
| | uxizumab | | VKPGESLRLSC | | 9144, | ASVGDRVTITC | | 9320, |
| | | | AASGFTFSDYY | | 9145 | KASQNVDTNV | | 9367 |
| | | | MYWVRQAPGK | | | AWYQQKPGQA | | |
| | | | GLEWVAIISDG | | | PKSLIYSASYRY | | |
| | | | GYYTYYSDIIK | | | SDVPSRFSGSAS | | |
| | | | GRFTISRDNAK | | | GTDFTLTISSVQ | | |
| | | | NSLYLQMNSLK | | | SEDFATYYCQQ | | |
| | | | AEDTAVYYCA | | | YDSYPYTFGGG | | |
| | | | RGFPLLRHGA | | | TKLEIK | | |
| | | | MDYWGQGTLV | | | | | |
| | | | TVSS | | | | | |
| | | ROR1 | QEQLVESGGRL | 8151 | 9146, | ELVLTQSPSVSA | 8247 | 9368, |
| | | | VTPGGSLTLSC | | 9147, | ALGSPAKITCTL | | 9369, |
| | | | KASGFDFSAYY | | 9148 | SSAHKTDTIDW | | 9370 |
| | | | MSWVRQAPGK | | | YQQLQGEAPRY | | |
| | | | GLEWIATIYPSS | | | LMQVQSDGSY | | |
| | | | GKTYYATWVN | | | TKRPGVPDRFS | | |
| | | | GRFTISSDNAQ | | | GSSSGADRYLII | | |
| | | | NTVDLQMNSLT | | | PSVQADDEADY | | |
| | | | AAD | | | YCGADYIGGY | | |
| | | | RATYFCARDSY | | | VFGGGTQLTVT | | |
| | | | ADDGALFNIW | | | G | | |
| | | | GPGTLVTISS | | | | | |
| | | ROR1 | EVKLVESGGGL | 8152 | 9085, | DIKMTQSPSSM | 8248 | 9371, |
| | | | VKPGGSLKLSC | | 9149, | YASLGERVTITC | | 9372, |
| | | | AASGFTFSSYA | | 9150 | KASPDINSYLS | | 9373 |
| | | | MSWVRQIPEKR | | | WFQQKPGKSPK | | |
| | | | LEWVASISRGG | | | TLIYRANRLVD | | |
| | | | TTYYPDSVKG | | | GVPSRFSGGGS | | |
| | | | RFTISRDNVRNI | | | GQDYSLTINSLE | | |
| | | | LYLQMSSLRSE | | | YEDMGIYYCLQ | | |
| | | | DT | | | YDEFPYTFGGG | | |
| | | | AMYYCGRYDY | | | TKLEMK | | |
| | | | DGYYAMDYW | | | | | |
| | | | GQGTSVTVSS | | | | | |
| | | ROR1 | QSLEESGGRLV | 8153 | 9151, | ELVMTQTPSSV | 8249 | 9374, |
| | | | TPGTPLTLTCTV | | 9152, | SAAVGGTVTIN | | 9375, |
| | | | SGIDLNSHWMS | | 9153 | CQASQSIGSYL | | 9376 |
| | | | WVRQAPGKGL | | | AWYQQKPGQP | | |
| | | | EWIGIIAASGST | | | PKLLIYYASNL | | |
| | | | YYANWAKGRF | | | ASGVPSRFSGS | | |
| | | | TISKTSTTVDLR | | | GSGTEYTLTISG | | |
| | | | IASPTTEDTATY | | | VQREDAATYY | | |
| | | | FCARDYGDYR | | | CLG | | |
| | | | LVTFNIWGPGT | | | SLSNSDNVFGG | | |
| | | | LVTVSS | | | GTELEIL | | |
| | | ROR1 | QSVKESEGDLV | 8154 | 9154, | ELVMTQTPSST | 8250 | 9377, |
| | | | TPAGNLTLTCT | | 9155, | SGAVGGTVTIN | | 9378, |
| | | | ASGSDINDYPIS | | 9156 | CQASQSIDSNL | | 9379 |
| | | | WVRQAPGKGL | | | AWFQQKPGQPP | | |
| | | | EWIGFINSGGS | | | TLLIYRASNLAS | | |
| | | | TWYASWVKG | | | GVPSRFSGSRSG | | |
| | | | RFTISRTSTTVD | | | TEYTLTISGVQR | | |
| | | | LKMTSLTTDDT | | | EDAATYYCLG | | |
| | | | ATY | | | GVGNVSYRTSF | | |
| | | | FCARGYSTYYC | | | GGGTEVVVK | | |
| | | | DFNIWGPGTLV | | | | | |
| | | | TISS | | | | | |
| CC49 | | TAG-72 | QVQLVQSGAEV | 8155 | 9157, | DIVMSQSPDSL | 8251 | 9380, |
| (Human- | | | VKPGASVKISC | | 9158, | AVSLGERVTLN | | 9381, |
| ized) | | | KASGYTFTDHA | | 9013 | CKSSQSLLYSG | | 9262 |
| | | | IHWVKQNPGQ | | | NQKNYLAWYQ | | |
| | | | RLEWIGYFSPG | | | QKPGQSPKLLIY | | |
| | | | NDDFKYNERF | | | WASARESGVP | | |
| | | | KGKATLTADTS | | | DRFSGSGSGTD | | |
| | | | ASTAYVELSSL | | | FTLTISSVQAED | | |
| | | | RSEDTAVYFCT | | | VAVYYCQQYY | | |
| | | | RSLNMAYWGQ | | | SYPLTFGAGTK | | |
| | | | GTLVTVSS | | | LELK | | |
| | Murine A1 | TPBG/5T4 | QIQLVQSGPEL | 8156 | 9159, | SIVMTQTPKFLL | 8252 | 9382, |
| | | | KKPGETVKISC | | 9160, | VSAGDRVTITC | | 9383, |
| | | | KASGYTFTNFG | | 9161 | KASQSVSNDVA | | 9384 |
| | | | MNWVKQGPGE | | | WYQQKPGQSP | | |
| | | | GLKWMGWINT | | | KLLINFATNRY | | |
| | | | NTGEPRYAEEF | | | TGVPNRFTGSG | | |
| | | | KGRXAFSLETT | | | YGTDFTFTISTV | | |
| | | | ASTAYLQINNL | | | QAEDLALYFCQ | | |
| | | | KNEDTATYFCA | | | Q | | |
| | | | RDWDGAYFFD | | | DYSSPWTFGGG | | |
| | | | YWGQGTTLTVS | | | TKLEIK | | |
| | | | S | | | | | |
| | Murine A2 | TPBG/5T4 | QVQLQQSRPEL | 8157 | 9162, | SVIMSRGQIVLT | 8253 | 9385, |
| | | | VKPGASVKMSC | | 9163, | QSPAIMSASLGE | | 9348, |
| | | | KASGYTFTDY | | 9164 | RVTLTCTASSS | | 9386 |
| | | | VISWVKQRTGQ | | | VNSNYLHWYQ | | |
| | | | GLEWIGEIYPG | | | QKPGSSPKLWI | | |
| | | | SNSIYYNEKFK | | | YSTSNLASGVP | | |
| | | | GRATLTA | | | ARFSGSGSGTS | | |
| | | | DKSSSTAYMQL | | | YSLTISSMEAED | | |
| | | | SSLTSEDSAVYF | | | AATYYCHQYH | | |
| | | | CAMGGNYGFD | | | RSPLTFGAGTK | | |
| | | | YWGQGTTLTVS | | | LELK | | |
| | | | S | | | | | |
| | Murine A3 | TPBG/5T4 | EVQLVESGGGL | 8158 | 742, | DIVMTQSHIFM | 8254 | 9387, |
| | | | VQPKGSLKLSC | | 9165, | STSVGDRVSITC | | 9388, |
| | | | AASGFTFNTYA | | 9166 | KASQDVDTAV | | 9389 |
| | | | MNWVRQAPGK | | | AWYQQKPGQS | | |
| | | | GLEWVARIRSK | | | PKLLIYWASTR | | |
| | | | SNNYATYYADS | | | LTGVPDRFTGS | | |
| | | | VKDRFTISRDD | | | GSGTDFTLTISN | | |
| | | | SQSMLYLQMN | | | VQSEDLADYFC | | |
| | | | NLKTEDTAMY | | | QQ | | |
| | | | XCVRQWDYDV | | | YSSYPYTFGGG | | |
| | | | RAMNYWGQGT | | | TKLEIK | | |
| | | | SVTVSS | | | | | |
| IMMU-132 | hRS-7 | TROP-2 | QVQLQQSGSEL | 8159 | 9016, | DIQLTQSPSSLS | 8255 | 9390, |
| | | | KKPGASVKVSC | | 9167, | ASVGDRVSITC | | 9391, |
| | | | KASGYTFTNYG | | 9168 | KASQDVSIAVA | | 9392 |
| | | | MNWVKQAPGQ | | | WYQQKPGKAP | | |
| | | | GLKWMGWINT | | | KLLIYSASYRY | | |
| | | | YTGEPTYTDDF | | | TGVPDRFSGSG | | |
| | | | KGRFAFSLDTS | | | SGTDFTLTISSL | | |
| | | | VSTAYLQISSLK | | | QPEDFAVYYCQ | | |
| | | | ADDTAVYFCAR | | | QHYITPLTFGA | | |
| | | | GGFGSSYWYF | | | GTKVEIK | | |
| | | | DVWGQGSLVT | | | | | |
| | | | VSS | | | | | |
| IMC-18F1 | icrucumab | VEGFR1 | QAQVVESGGG | 8160 | 9169, | EIVLTQSPGTLS | 8256 | 9285, |
| | | | VVQSGRSLRLS | | 9170, | LSPGERATLSC | | 9182, |
| | | | CAASGFAFSSY | | 9171 | RASQSVSSSYL | | 9393 |
| | | | GMHWVRQAP | | | AWYQQKPGQA | | |
| | | | GKGLEWVAVI | | | PRLLIYGASSRA | | |
| | | | WYDGSNKYYA | | | TGIPDRFSGSGS | | |
| | | | DSVRGRFTISR | | | GTDFTLTISRLE | | |
| | | | DNSENTLYLQM | | | PEDFAVYYCQQ | | |
| | | | NSLRAEDTAVY | | | YGSSPLTFGGG | | |
| | | | YCARDHYGSG | | | TKVEIK | | |
| | | | VHHYFYYGLD | | | | | |
| | | | VWGQGTTVTV | | | | | |
| | | | SS | | | | | |
| Cyramza | ramu- | VEGFR2 | EVQLVQSGGGL | 8161 | 9172, | DIQMTQSPSSVS | 8257 | 9394, |
| | cirumab | | VKPGGSLRLSC | | 9173, | ASIGDRVTITCR | | 9395, |
| | | | AASGFTFSSYS | | 9174 | ASQGIDNWLG | | 9396 |
| | | | MNWVRQAPGK | | | WYQQKPGKAP | | |
| | | | GLEWVSSISSSS | | | KLLIYDASNLD | | |
| | | | SYIYYADSVKG | | | TGVPSRFSGSGS | | |
| | | | RFTISRDNAKNS | | | GTYFTLTISSLQ | | |
| | | | LYLQMNSLRAE | | | AEDFAVYFCQQ | | |
| | | | DTAVYYCARV | | | AKAFPPTFGGG | | |
| | | | TDAFDIWGQGT | | | TKVDIK | | |
| | | | MVTVSSA | | | | | |
| g165DFM- | alaciz- | VEGFR2 | EVQLVESGGGL | 8162 | 9175, | DIQMTQSPSSLS | 8258 | 9397, |
| | umab | | VQPGGSLRLSC | | 9176, | ASVGDRVTITC | | 9212, |
| | pegol | | AASGFTFSSYG | | 9177 | RASQDIAGSLN | | 9398 |
| PEG | | | MSWVRQAPGK | | | WLQQKPGKAIK | | |
| | | | GLEWVATITSG | | | RLIYATSSLDSG | | |
| | | | GSYTYYVDSV | | | VPKRFSGSRSGS | | |
| | | | KGRFTISRDNA | | | DYTLTISSLQPE | | |
| | | | KNTLYLQMNSL | | | DFATYYCLQY | | |
| | | | RAEDTAVYYC | | | GSFPPTFGQGT | | |
| | | | VRIGEDALDY | | | KVEIK | | |
| | | | WGQGTLVTVSS | | | | | |
| Imclone6. | | VEGFR2 | KVQLQQSGTEL | 8163 | | DIVLTQSPASLA | 8259 | |
| 64 | | | VKPGASVKVSC | | | VSLGQRATISCR | | |
| | | | KASGYIFTEYII | | | ASESVDSYGNS | | |
| | | | HWVKQRSGQG | | | FMHWYQQKPG | | |
| | | | LEWIGWLYPES | | | QPPKLLIYRASN | | |
| | | | NIIKYNEKFKD | | | LESGIPARFSGS | | |
| | | | KATLTADKSSS | | | GSRTDFTLTINP | | |
| | | | TVYMELSRLTS | | | VEADDVATYY | | |
| | | | EDSAVYFCTRH | | | CQQSNEDPLTF | | |
| | | | DGTNFDYWGQ | | | GAGTKLELK | | |
| | | | GTTLTVSSA | | | | | |

* underlined & bolded sequences, if present, are CDRs within the VL and VH

[0225] Epithelial cell adhesion molecule (EpCAM, also known as 17-1A antigen) is a 40-kDa membrane-integrated glycoprotein composed of 314 amino acids expressed in certain epithelia and on many human carcinomas (see, Balzar, The biology of the 17-1A antigen (Ep-CAM), J. Mol. Med. 1999, 77:699-712). Because of their epithelial cell origin, tumor cells from most carcinomas express EpCAM on their surface (more so than normal, healthy cells), including the majority of primary, metastatic, and disseminated non-small cell lung carcinoma cells (Passlick, B., et al. The 17-1A antigen is expressed on primary, metastatic and disseminated non-small cell lung carcinoma cells. Int. J. Cancer 87(4):548-552, 2000), gastric and gastro-oesophageal junction adenocarcinomas (Martin, I. G., Expression of the 17-1A antigen in gastric and gastro-oesophageal junction adenocarcinomas: a potential immunotherapeutic target? J Clin Pathol 1999; 52:701-704), and breast and colorectal cancer (Packeisen J, et al. Detection of surface antigen 17-1A in breast and colorectal cancer. Hybridoma. 1999 18(1):37-40) in breast cancer, overexpression of EpCAM on tumor cells is a predictor of survival (Gastl, Lancet. 2000, 356, 1981-1982). Due to their epithelial cell origin, tumor cells from most carcinomas express EpCAM on their surface.

[0226] In one embodiment provided herein are bispecific chimeric polypeptide assembly compositions with a first portion having a binding domain specific for EpCAM and a binding domain specific for CD3. The technical problem to be solved was to provide means and methods for the generation of improved compositions exhibiting the properties of being well-tolerated and more convenient medicaments (less frequent dosing) for the effective treatment and or amelioration of tumorous diseases. The solution to said technical problem is achieved by the embodiments disclosed herein and characterized in the claims.

[0227] Accordingly, in some embodiments, the present invention relates to chimeric polypeptide assembly compositions whereby said composition comprises a first portion comprising a bispecific single chain antibody composition comprising at least two binding domains, whereby one of said domains binds to an effector cell antigen, such as CD3 antigen and a second domain binds to EpCAM antigen, wherein said binding domains comprise VL and VH specific for EpCAM and VL and VH specific for human CD3 antigen. Preferably, in the embodiment, said binding domain specific for EpCAM has a K_{d} value of greater than 10⁻⁷ to 10⁻¹⁰ M, as determined in an in vitro binding assay. In one embodiment of the foregoing, the binding domains are in a scFv format. In another embodiment of the foregoing, the binding domains are in a single chain diabody format.

[0228] In some embodiments, the invention provides chimeric polypeptide assembly compositions comprising a first portion binding domain with binding affinity to a tumor-specific marker and a second binding domain binds to an effector cell antigen, such as CD3 antigen. Tumor-specific markers comprising these embodiments of the invention include but are not limited to CCR5, CD19, HER-2, HER-3, HER-4, EGFR, PSMA, CEA, MUC1, MUC2, MUC3, MUC4, MUC5AC, MUC5B, MUC7, βhCG, Lewis-Y, CD-20, CD33, CD30, ganglioside GD3, 9-O-Acetyl-GD3, Globo H, fucosyl GM1, GD-2, carbonic anhydrase IX, CD44v6, Sonic Hedgehog, Wue-1, plasma cell antigen 1, melanoma chondroitin sulfate proteoglycan, CCR8, 6-transmembrane epithelial antigen of prostate (STEAP), mesothelin, A33 antigen, prostate stem cell antigen (PSCA), LY-6, SAS, desmoglein 4, fetal acetylcholine receptor, CD-25, cancer antigen 19-9 (CA 19-9), cancer antigen 125 (CA-125), Muellerian inhibitory substance type II receptor (MISIIR), sialylated Tn antigen, fibroblast activation antigen (FAP), endosialin (CD248), epidermal growth factor receptor variant III (EGFRvIII), tumor-associated antigen L6 (TAL6), CD-63, TAG-72, Thomsen-Friedenreich antigen (TF-antigen), insulin-like growth factor I receptor (IGF-IR), Cora antigen, CD7, CD22, CD79a, CD79b, G250, F19, EphA2, and MT-MM. In certain embodiments, the invention provides a chimeric polypeptide assembly composition comprising a first portion binding domain with binding affinity to the tumor-specific marker comprising anti-marker VL and VH sequences. Exemplary, non-limiting examples of VL and VH sequences specific for certain of these tumor markers are set forth in Table 6f. In other embodiments, the invention provides a chimeric polypeptide assembly composition comprising a first portion binding domain with binding affinity to the tumor-specific marker comprising the CDR-L1 region, the CDR-L2 region, the CDR-L3 region, the CDR-H1 region, the CDR-H2 region, and the CDR-H3 region, wherein each is derived from the respective VL and VH sequences. Preferably, in the embodiments, said binding has a K_{d} value of greater than 10⁻⁷ to 10⁻¹⁰ M, as determined in an in vitro binding assay.

[0229] It is specifically contemplated that the chimeric polypeptide assembly composition can comprise any one of the foregoing binding domains or sequence variants thereof so long as the variants exhibit binding specificity for the described antigen. In one embodiment, a sequence variant would be created by substitution of an amino acid in the VL or VH sequence with a different amino acid. In deletion variants, one or more amino acid residues in a VL or VH sequence as described herein are removed. Deletion variants, therefore, include all fragments of a binding domain polypeptide sequence. In substitution variants, one or more amino acid residues of a VL or VH (or CDR) polypeptide are removed and replaced with alternative residues. In one aspect, the substitutions are conservative in nature and conservative substitutions of this type are well known in the art. In addition, it is specifically contemplated that the compositions comprising the first and the second binding domains disclosed herein can be utilized in any of the methods disclosed herein.

### Unstructured Conformation

[0230] Typically, the XTEN polypeptide component of the fusion proteins disclosed herein are designed to behave like denatured peptide sequences under physiological conditions, despite the extended length of the polymer. “Denatured” describes the state of a peptide in solution that is characterized by a large conformational freedom of the peptide backbone. Most peptides and proteins adopt a denatured conformation in the presence of high concentrations of denaturants or at elevated temperature. Peptides in denatured conformation have, for example, characteristic circular dichroism (CD) spectra and are characterized by a lack of long-range interactions as determined by NMR. “Denatured conformation” and “unstructured conformation” are used synonymously herein. In some cases, the invention provides XTEN polypeptides that, under physiologic conditions, can resemble denatured sequences largely devoid in secondary structure. In other cases, the XTEN polypeptides can be substantially devoid of secondary structure under physiologic conditions. “Largely devoid,” as used in this context, means that less than 50% of the XTEN amino acid residues of each XTEN polypeptide contribute to secondary structure as measured or determined by the means described herein. “Substantially devoid,” as used in this context, means that at least about 60%, or about 70%, or about 80%, or about 90%, or about 95%, or at least about 99% of the XTEN amino acid residues of the XTEN sequence do not contribute to secondary structure, as measured or determined by the means described herein.

[0231] A variety of methods have been established in the art to discern the presence or absence of secondary and tertiary structures in a given polypeptide. In particular, XTEN secondary structure can be measured spectrophotometrically, e.g., by circular dichroism spectroscopy in the “far-UV” spectral region (190-250 nm). Secondary structure elements, such as alpha-helix and beta-sheet, each give rise to a characteristic shape and magnitude of CD spectra. Secondary structure can also be predicted for a polypeptide sequence via certain computer programs or algorithms, such as the well-known Chou-Fasman algorithm (Chou, P. Y., et al. (1974) Biochemistry, 13: 222-45) and the Garnier-Osguthorpe-Robson (“GOR”) algorithm (Garnier J, Gibrat J F, Robson B. (1996), GOR method for predicting protein secondary structure from amino acid sequence. Methods Enzymol 266:540-553), as described in US Patent Application Publication No. 20030228309A1. For a given sequence, the algorithms can predict whether there exists some or no secondary structure at all, expressed as the total and/or percentage of residues of the sequence that form, for example, alpha-helices or beta-sheets or the percentage of residues of the sequence predicted to result in random coil formation (which lacks secondary structure).

[0232] In some cases, the XTEN polypeptides used in the inventive fusion protein compositions can have an alpha-helix percentage ranging from 0% to less than about 5% as determined by a Chou-Fasman algorithm. In other cases, the XTEN polypeptides comprising the fusion protein compositions can have a beta-sheet percentage ranging from 0% to less than about 5% as determined by a Chou-Fasman algorithm. In some cases, the XTEN sequences of the fusion protein compositions can have an alpha-helix percentage ranging from 0% to less than about 5% and a beta-sheet percentage ranging from 0% to less than about 5% as determined by a Chou-Fasman algorithm. In preferred embodiments, the XTEN polypeptides comprising the fusion protein compositions can have an alpha-helix percentage less than about 2% and a beta-sheet percentage less than about 2%. In other cases, the XTEN sequences of the fusion protein compositions can have a high degree of random coil percentage, as determined by a GOR algorithm. In some embodiments, an XTEN polypeptide can have at least about 80%, more preferably at least about 90%, more preferably at least about 91%, more preferably at least about 92%, more preferably at least about 93%, more preferably at least about 94%, more preferably at least about 95%, more preferably at least about 96%, more preferably at least about 97%, more preferably at least about 98%, and most preferably at least about 99% random coil, as determined by a GOR algorithm.

### Net Charge

[0233] In other cases, the XTEN polypeptides can have an unstructured characteristic imparted by incorporation of amino acid residues with a net charge and/or reducing the proportion of hydrophobic amino acids in the XTEN polypeptide. The overall net charge and net charge density can be controlled by modifying the content of charged amino acids in the XTEN polypeptides. In some cases, the net charge density of the XTEN of the compositions can be above +0.1 or below −0.1 charges/residue. In other cases, the net charge of a XTEN polypeptide can be about 0%, about 1%, about 2%, about 3%, about 4%, about 5%, about 6%, about 7%, about 8%, about 9%, about 10% about 11%, about 12%, about 13%, about 14%, about 15%, about 16%, about 17%, about 18%, about 19%, or about 20% or more.

[0234] Because most tissues and surfaces in a human or animal have a net negative charge, the XTEN polypeptides can be designed to have a net negative charge to minimize non-specific interactions between the XTEN polypeptide-containing compositions and various surfaces such as blood vessels, healthy tissues, or various receptors. Not to be bound by a particular theory, the XTEN polypeptide can adopt open conformations due to electrostatic repulsion between individual amino acids of the XTEN polypeptide that individually carry a high net negative charge and that are distributed across the sequence of the XTEN polypeptide. Such a distribution of net negative charge in the extended sequence lengths of XTEN polypeptide can lead to an unstructured conformation that, in turn, can result in an effective increase in hydrodynamic radius. Accordingly, in one embodiment the invention provides XTEN polypeptides in which the XTEN polypeptides contain about 8, 10, 15, 20, 25, or even about 30% glutamic acid. The XTEN polypeptides of the compositions of the present invention generally have no or a low content of positively charged amino acids. In some cases the XTEN polypeptides can have less than about 10% amino acid residues with a positive charge, or less than about 7%, or less than about 5%, or less than about 2% amino acid residues with a positive charge. However, the invention contemplates constructs where a limited number of amino acids with a positive charge, such as lysine, can be incorporated into XTEN polypeptides to permit conjugation between the epsilon amine of the lysine and a reactive group on a peptide, a linker bridge, or a reactive group on a drug or small molecule to be conjugated to the XTEN polypeptide backbone. In the foregoing, a fusion proteins can be constructed that comprises one or more XTEN polypeptides, a biologically active protein, plus a chemotherapeutic agent useful in the treatment of metabolic diseases or disorders, wherein the maximum number of molecules of the agent incorporated into the XTEN polypeptide component is determined by the numbers of lysines or other amino acids with reactive side chains (e.g., cysteine) incorporated into the XTEN.

[0235] In some cases, an XTEN polypeptide can comprise charged residues separated by other residues such as serine or glycine, which can lead to better expression or purification behavior. Based on the net charge, XTEN polypeptides of the human or animal compositions can have an isoelectric point (pI) of 1.0, 1.5, 2.0, 2.5, 3.0, 3.5, 4.0, 4.5, 5.0, 5.5, 6.0, or even 6.5. In preferred embodiments, the XTEN polypeptide has an isoelectric point between 1.5 and 4.5. In these embodiments, the XTEN incorporated into the BPXTEN fusion protein compositions of the present invention would carry a net negative charge under physiologic conditions that can contribute to the unstructured conformation and reduced binding of the XTEN polypeptide component to mammalian proteins and tissues.

[0236] As hydrophobic amino acids can impart structure to a polypeptide, the invention provides that the content of hydrophobic amino acids in the XTEN polypeptides typically is less than 5%, or less than 2%, or less than 1% hydrophobic amino acid content. In one embodiment, the amino acid content of methionine and tryptophan in the XTEN component of a BPXTEN fusion protein is typically less than 5%, or less than 2%, and most preferably less than 1%. In another embodiment, the XTEN polypeptide has a sequence that has less than 10% amino acid residues with a positive charge, or less than about 7%, or less that about 5%, or less than about 2% amino acid residues with a positive charge, the sum of methionine and tryptophan residues is less than 2%, and the sum of asparagine and glutamine residues is less than 10% of the total XTEN polypeptide.

### Increased Hydrodynamic Radius

[0237] In some embodiments, the XTEN polypeptide can have a high hydrodynamic radius, conferring a corresponding increased Apparent Molecular Weight to the BPXTEN fusion protein which incorporates the XTEN polypeptide. The linking of an XTEN polypeptide to BP sequences can result in BPXTEN compositions that can have increased hydrodynamic radii, increased Apparent Molecular Weight, and increased Apparent Molecular Weight Factor compared to a BP not linked to an XTEN polypeptide. For example, in therapeutic applications in which prolonged half-life is desired, compositions in which a XTEN polypeptide with a high hydrodynamic radius is incorporated into a fusion protein comprising one or more BP can effectively enlarge the hydrodynamic radius of the composition beyond the glomerular pore size of approximately 3-5 nm (corresponding to an apparent molecular weight of about 70 kDA) (Caliceti. 2003. Pharmacokinetic and biodistribution properties of poly(ethylene glycol)-protein conjugates. Adv. Drug Deliv. Rev. 55:1261-1277), resulting in reduced renal clearance of circulating proteins. Not to be bound by a particular theory, an XTEN polypeptide can adopt open conformations due to electrostatic repulsion between individual charges of the peptide or the inherent flexibility imparted by the particular amino acids in the sequence that lack potential to confer secondary structure. The open, extended and unstructured conformation of the XTEN polypeptide can have a greater proportional hydrodynamic radius compared to polypeptides of a comparable sequence length and/or molecular weight that have secondary and/or tertiary structure, such as typical globular proteins. Methods for determining the hydrodynamic radius are well known in the art, such as by the use of size exclusion chromatography (SEC), as described in U.S. Pat. Nos. 6,406,632 and 7,294,513. The addition of increasing lengths of XTEN polypeptides results in proportional increases in the parameters of hydrodynamic radius, Apparent Molecular Weight, and Apparent Molecular Weight Factor, permitting the tailoring of BPXTEN to desired characteristic cut-off Apparent Molecular Weights or hydrodynamic radii. Accordingly, in certain embodiments, the BPXTEN fusion protein can be configured with an XTEN polypeptide, wherein the fusion protein can have a hydrodynamic radius of at least about 5 nm, or at least about 8 nm, or at least about 10 nm, or 12 nm, or at least about 15 nm. In the foregoing embodiments, the large hydrodynamic radius conferred by XTEN polypeptides in an BPXTEN fusion protein can lead to reduced renal clearance of the resulting fusion protein, leading to a corresponding increase in terminal half-life, an increase in mean residence time, and/or a decrease in renal clearance rate.

[0238] In another embodiment, an XTEN polypeptide of a chosen length and sequence can be selectively incorporated into a BPXTEN to create a fusion protein that has, under physiologic conditions, an Apparent Molecular Weight of at least about 150 kDa, or at least about 300 kDa, or at least about 400 kDa, or at least about 500 kDA, or at least about 600 kDa, or at least about 700 kDA, or at least about 800 kDa, or at least about 900 kDa, or at least about 1000 kDa, or at least about 1200 kDa, or at least about 1500 kDa, or at least about 1800 kDa, or at least about 2000 kDa, or at least about 2300 kDa or more. In another embodiment, an XTEN polypeptide of a chosen length and sequence can be selectively linked to a BP to result in a BPXTEN fusion protein that has, under physiologic conditions, an Apparent Molecular Weight Factor of at least three, alternatively of at least four, alternatively of at least five, alternatively of at least six, alternatively of at least eight, alternatively of at least 10, alternatively of at least 15, or an Apparent Molecular Weight Factor of at least 20 or greater. In another embodiment, the BPXTEN fusion protein has, under physiologic conditions, an Apparent Molecular Weight Factor that is about 4 to about 20, or is about 6 to about 15, or is about 8 to about 12, or is about 9 to about 10 relative to the actual molecular weight of the fusion protein. In some embodiments, the (fusion) polypeptide exhibits an apparent molecular weight factor under physiological conditions that is greater than about 6.

### Increased Terminal Half-Life

[0239] In some embodiments, the (fusion) polypeptide has a terminal half-life that is at least two-fold longer, or at least three-fold longer, or at least four-fold longer, or at least five-fold longer, compared to the biologically active polypeptide not linked to an XTEN polypeptide. In some embodiments, the (fusion) polypeptide has a terminal half-life that is at least two-fold longer compared to the biologically active polypeptide not linked to an XTEN polypeptide.

[0240] Administration of a therapeutically effective dose of any of the embodiments of BPXTEN fusion proteins described herein to a human or animal in need thereof can result in a gain in time of at least two-fold, or at least three-fold, or at least four-fold, or at least five-fold or more spent within a therapeutic window for the fusion protein compared to the corresponding BP not linked to the XTEN polypeptide of and administered at a comparable dose to a human or animal.

### Low Immunogenicity

[0241] In another aspect, the invention provides compositions in which the XTEN polypeptides have a low degree of immunogenicity or are substantially non-immunogenic. Several factors can contribute to the low immunogenicity of XTEN polypeptides, e.g., the substantially non-repetitive sequence, the unstructured conformation thereof, the high degree of solubility, the low degree or lack of self-aggregation, the low degree or lack of proteolytic sites within the sequence, and the low degree or lack of epitopes in XTEN polypeptides.

[0242] One of ordinary skill in the art will understand that, in general, a polypeptide having highly repetitive short amino acid sequences (e.g., wherein a 200 amino acid-long sequence contain on average 20 repeats or more of a limited set of 3- or 4-mers) and/or having contiguous repetitive amino acid residues (e.g., wherein 5- or 6-mer sequences have identical amino acid residues) have a tendency to aggregate or form higher order structures or form contacts resulting in crystalline or pseudo-crystalline structures.

[0243] In some embodiments, XTEN polypeptides are substantially non-repetitive, wherein the XTEN amino acid sequence has no three contiguous amino acids that are identical amino acid types, unless the amino acid is serine, in which case no more than three contiguous amino acids can be serine residues; and wherein the XTEN amino acid sequence contains no 3-amino acid sequences (3-mers) that occur more than 16, more than 14, more than 12, or more than 10 times within a 200 amino acid-long sequence of the XTEN polypeptide. One of ordinary skill in the art will understand that such substantially non-repetitive sequences have less tendency to aggregate and, thus, enable the design of long-sequence XTENs with a relatively low frequency of charged amino acids that would be likely to aggregate if the sequences or amino acid residues were otherwise more repetitive.

[0244] Conformational epitopes are formed by regions of the protein surface that are composed of multiple discontinuous amino acid sequences of the protein antigen. The precise folding of the protein brings these sequences into a well-defined, stable spatial configurations, or epitopes, that can be recognized as “foreign” by the host humoral immune system, resulting in the production of antibodies to the protein or triggering a cell-mediated immune response. In the latter case, the immune response to a protein in an individual is heavily influenced by T-cell epitope recognition that is a function of the peptide binding specificity of that individual's HLA-DR allotype. Engagement of an MHC Class II peptide complex by a cognate T-cell receptor on the surface of the T-cell, together with the cross-binding of certain other co-receptors such as the CD4 molecule, can induce an activated state within the T-cell. Activation leads to the release of cytokines further activating other lymphocytes such as B cells to produce antibodies or activating T killer cells as a full cellular immune response.

[0245] The ability of a peptide to bind a given MHC Class II molecule for presentation on the surface of an APC (antigen presenting cell) is dependent on a number of factors; most notably its primary sequence. In one embodiment, a lower degree of immunogenicity can be achieved by designing XTEN polypeptides that resist antigen processing in antigen presenting cells, and/or choosing sequences that do not bind MHC receptors well. The invention provides BPXTEN fusion proteins with substantially non-repetitive XTEN polypeptides designed to reduce binding with MHC II receptors, as well as avoiding formation of epitopes for T-cell receptor or antibody binding, resulting in a low degree of immunogenicity. Avoidance of immunogenicity is, in part, a direct result of the conformational flexibility of XTEN polypeptides; i.e., the lack of secondary structure due to the selection and order of amino acid residues. For example, of particular interest are sequences having a low tendency to adapt compactly folded conformations in aqueous solution or under physiologic conditions that could result in conformational epitopes. The administration of fusion proteins comprising XTEN polypeptides(s), using conventional therapeutic practices and dosing, would generally not result in the formation of neutralizing antibodies to the XTEN polypeptide, and can also reduce the immunogenicity of the BP fusion partner in the BPXTEN compositions.

[0246] In one embodiment, the XTEN polypeptides utilized in the human or animal fusion proteins can be substantially free of epitopes recognized by human T cells. The elimination of such epitopes for the purpose of generating less immunogenic proteins has been disclosed previously; see for example WO 98/52976, WO 02/079232, and WO 00/3317 which are incorporated by reference herein. Assays for human T cell epitopes have been described (Stickler, M., et al. (2003) J Immunol Methods, 281: 95-108). Of particular interest are peptide sequences that can be oligomerized without generating T cell epitopes or non-human sequences. This can be achieved by testing direct repeats of these sequences for the presence of T-cell epitopes and for the occurrence of 6 to 15-mer and, in particular, 9-mer sequences that are not human, and then altering the design of the XTEN polypeptide to eliminate or disrupt the epitope sequence. In some cases, the XTEN polypeptides are substantially non-immunogenic by the restriction of the numbers of epitopes of the XTEN polypeptide predicted to bind MHC receptors. With a reduction in the numbers of epitopes capable of binding to MHC receptors, there is a concomitant reduction in the potential for T cell activation as well as T cell helper function, reduced B cell activation or upregulation and reduced antibody production. The low degree of predicted T-cell epitopes can be determined by epitope prediction algorithms such as, e.g., TEPITOPE (Sturniolo, T., et al. (1999) Nat Biotechnol, 17: 555-61), as shown in Example 74 of International Patent Application Publication No. WO 2010/144502 A2, which is incorporated by reference in its entirety. The TEPITOPE score of a given peptide frame within a protein is the log of the K_{d} (dissociation constant, affinity, off-rate) of the binding of that peptide frame to multiple of the most common human MHC alleles, as disclosed in Sturniolo, T. et al. (1999) Nature Biotechnology 17:555). The score ranges over at least 20 logs, from about 10 to about −10 (corresponding to binding constraints of 10e¹⁰ K_{d} to 10e⁻¹⁰ K_{d}), and can be reduced by avoiding hydrophobic amino acids that can serve as anchor residues during peptide display on MHC, such as M, I, L, V, F. In some embodiments, an XTEN polypeptide incorporated into a BPXTEN does not have a predicted T-cell epitope at a TEPITOPE score of about −5 or greater, or −6 or greater, or −7 or greater, or −8 or greater, or at a TEPITOPE score of −9 or greater. As used herein, a score of “−9 or greater” would encompass TEPITOPE scores of 10 to −9, inclusive, but would not encompass a score of −10, as −10 is less than −9.

[0247] In another embodiment, the inventive XTEN polypeptides, including those incorporated into the human or animal BPXTEN fusion proteins, can be rendered substantially non-immunogenic by the restriction of known proteolytic sites from the sequence of the XTEN polypeptide, reducing the processing of XTEN polypeptides into small peptides that can bind to MHC II receptors. In another embodiment, the XTEN polypeptide can be rendered substantially non-immunogenic by the use a sequence that is substantially devoid of secondary structure, conferring resistance to many proteases due to the high entropy of the structure. Accordingly, the reduced TEPITOPE score and elimination of known proteolytic sites from the XTEN polypeptides can render the XTEN-polypeptide compositions, including the XTEN polypeptides of the BPXTEN fusion protein compositions, substantially unable to be bound by mammalian receptors, including those of the immune system. In one embodiment, an XTEN polypeptide of a BPXTEN fusion protein can have >100 nM K_{d} binding to a mammalian receptor, or greater than 500 nM K_{d}, or greater than 1 μM K_{d} towards a mammalian cell surface or circulating polypeptide receptor.

[0248] Additionally, the substantially non-repetitive sequence and corresponding lack of epitopes of such embodiments of XTEN polypeptides can limit the ability of B cells to bind to or be activated by XTEN polypeptides. While an XTEN polypeptide can make contacts with many different B cells over its extended sequence, each individual B cell can only make one or a small number of contacts with an individual XTEN polypeptide. As a result, XTEN polypeptides typically can have a much lower tendency to stimulate proliferation of B cells and thus an immune response. In one embodiment, the BPXTEN can have reduced immunogenicity as compared to the corresponding BP that is not fused. In one embodiment, the administration of up to three parenteral doses of a BPXTEN to a mammal can result in detectable anti-BPXTEN IgG at a serum dilution of 1:100 but not at a dilution of 1:1000. In another embodiment, the administration of up to three parenteral doses of an BPXTEN to a mammal can result in detectable anti-BP IgG at a serum dilution of 1:100 but not at a dilution of 1:1000. In another embodiment, the administration of up to three parenteral doses of an BPXTEN to a mammal can result in detectable anti-XTEN IgG at a serum dilution of 1:100 but not at a dilution of 1:1000. In the foregoing embodiments, the mammal can be a mouse, a rat, a rabbit, or a cynomolgus monkey.

[0249] An additional feature of certain embodiments of XTEN polypeptides with substantially non-repetitive sequences relative to those less non-repetitive sequences (such as one having three contiguous amino acids that are identical) can be that non-repetitive XTEN polypeptides form weaker contacts with antibodies (e.g. monovalent interactions), thereby resulting in less likelihood of immune clearance wherein the BPXTEN compositions can remain in circulation for an increased period of time.

[0250] In some embodiments, the (fusion) polypeptide is less immunogenic compared to the biologically active polypeptide not linked to an XTEN polypeptide, wherein immunogenicity is ascertained by measuring production of IgG antibodies that selectively bind to the biologically active polypeptide after administration of comparable doses to a human or animal.

### Spacers & BP Release Segment

[0251] In some embodiments, at least a portion of the biological activity of the respective BP is retained by the intact BPXTEN. In some embodiments, the BP component either becomes biologically active or has an increase in biological activity upon its release from the XTEN polypeptide(s) by cleavage of an optional cleavage sequence incorporated within spacer sequences into the BPXTEN, as described more fully hereinbelow.

[0252] Any spacer sequence group is optional in the fusion proteins encompassed by the invention. The spacer can be provided to enhance expression of the fusion protein from a host cell or to decrease steric hindrance wherein the BP component can assume its desired tertiary structure and/or interact appropriately with its target molecule. For spacers and methods of identifying desirable spacers, see, for example, George, et al. (2003) Protein Engineering 15:871-879, specifically incorporated by reference herein. In one embodiment, the spacer comprises one or more peptide sequences that are between 1 to 50 amino acid residues in length, or about 1 to 25 residues, or about 1 to 10 residues in length. Spacer sequences, exclusive of cleavage sites, can comprise any of the 20 natural L amino acids, and preferably comprises hydrophilic amino acids that are sterically unhindered that can include, but not be limited to, glycine (G), alanine (A), serine (S), threonine (T), glutamate (E) and proline (P). In some embodiments, the spacer can be polyglycines or polyalanines, or predominately a mixture of combinations of glycine and alanine residues. The spacer polypeptide exclusive of a cleavage sequence is largely to substantially devoid of secondary structure. In one embodiment, one or both spacer sequences in a BPXTEN fusion protein composition can each further contain a cleavage sequence, which can be identical or can be different, wherein the cleavage sequence can be acted on by a protease to release the BP from the fusion protein.

[0253] In some cases, the incorporation of the cleavage sequence into the BPXTEN is designed to permit release of a BP that becomes active or more active upon its release from the XTEN polypeptide. The cleavage sequences are located sufficiently close to the BP sequences, generally within 18, or within 12, or within 6, or within 2 amino acids of the BP sequence terminus, wherein any remaining residues attached to the BP after cleavage do not appreciably interfere with the activity (e.g., such as binding to a receptor) of the BP, yet provide sufficient access to the protease to be able to effect cleavage of the cleavage sequence. In some embodiments, the cleavage site is a sequence that can be cleaved by a protease endogenous to the mammalian human or animal wherein the BPXTEN can be cleaved after administration to a human or animal. In such cases, the BPXTEN can serve as a prodrug or a circulating depot for the BP. Examples of cleavage sites contemplated by the invention include, but are not limited to, a polypeptide sequence cleavable by a mammalian endogenous protease selected from FXIa, FXIIa, kallikrein, FVIIa, FIXa, FXa, FIIa (thrombin), Elastase-2, granzyme B, MMP-12, MMP-13, MMP-17 or MMP-20, or by non-mammalian proteases such as TEV, enterokinase, PreScission™ protease (rhinovirus 3C protease), and sortase A. Sequences known to be cleaved by the foregoing proteases are known in the art. Exemplary cleavage sequences and cleavage sites within the sequences are set forth in Table 7a, as well as sequence variants. For example, thrombin (activated clotting factor II) acts on the sequence LTPRSLLV (SEQ ID NO: 222) {Rawlings N. D., et al. (2008) Nucleic Acids Res., 36: D320}, which would be cleaved after the arginine at position 4 in the sequence. Active FIIa is produced by cleavage of FII by FXa in the presence of phospholipids and calcium and is downstream from factor IX in the coagulation pathway. Once activated its natural role in coagulation is to cleave fibrinogen, which then in turn, begins clot formation. FIIa activity is tightly controlled and only occurs when coagulation is necessary for proper hemostasis. However, as coagulation is an on-going process in mammals, by incorporation of the LTPRSLLV (SEQ ID NO: 223) sequence into the BPXTEN between the BP and the XTEN polypeptide, the XTEN polypeptides would be removed from the adjoining BP concurrent with activation of either the extrinsic or intrinsic coagulation pathways when coagulation is required physiologically, thereby releasing BP over time. Similarly, incorporation of other sequences into BPXTEN that are acted upon by endogenous proteases would provide for sustained release of BP that can, in certain cases, provide a higher degree of activity for the BP from the “prodrug” form of the BPXTEN.

[0254] In some cases, only the two or three amino acids flanking both sides of the cleavage site (four to six amino acids total) would be incorporated into the cleavage sequence. In other cases, the known cleavage sequence can have one or more deletions or insertions or one or two or three amino acid substitutions for any one or two or three amino acids in the known sequence, wherein the deletions, insertions or substitutions result in reduced or enhanced susceptibility but not an absence of susceptibility to the protease, resulting in an ability to tailor the rate of release of the BP from the XTEN. Exemplary substitutions are shown in Table 7a.

TABLE 7a
Protease Cleavage Sequences for BP Release

| | | Exemplary | |
|---|---|---|---|
| Protease Acting | SEQ ID | Cleavage | |
| Upon Sequence | NO | Sequence | Minimal Cleavage Site* |
| FXIa | 224 | KLTR↓VVGG | KD/FL/T/R↓VA/VE/GT/GV |
| FXIIa | 225 | TMTR↓IVGG | NA |
| Kallikrein | 226 | SPFR↓STGG | -/-/FL/RY↓SR/RT/-/- |
| FVIIa | 227 | LQVR↓IVGG | NA |
| FIXa | 228 | PLGR↓IVGG | -/-/G/R↓-/-/-/- |
| FXa | 229 | IEGR↓TVGG | IA/E/GFP/R↓STI/VFS/-/G |
| FIIa (thrombin) | 230 | LTPR↓SLLV | -/-/PLA/R↓SAG/-/-/- |
| Elastase-2 | 231 | LGPV↓SGVP | -/-/VIAT↓-/-/-/- |
| Granzyme-B | 232 | VAGD↓SLEE | V/-/-/D↓-/-/-/- |
| MMP-12 | 233 | GPAG↓LGGA | G/PA/-/G↓L/-/G/- (SEQ ID NO: 241) |
| MMP-13 | 234 | GPAG↓LRGA | G/P/-/G↓L/-/GA/- (SEQ ID NO: 242) |
| MMP-17 | 235 | APLG↓LRLR | -/PS/-/-↓LQ/-/LT/- |
| MMP-20 | 236 | PALP↓LVAQ | NA |
| TEV | 237 | ENLYFQ↓VG | ENLYFQ↓G/S (SEQ ID NO: 243) |
| Enterokinase | 238 | DDDK↓IVGG | DDDK↓IVGG (SEQ ID NO: 244) |
| Protease 3C | 239 | LEVLFQ↓GP | LEVLFQ↓GP (SEQ ID NO: 245) |
| (PreScission ™) | | | |
| Sortase A | 240 | LPKT↓GSES | L/P/KEAD/T↓G/-/EKS/S |
| | | | (SEQ ID NO: 246) |

↓indicates cleavage site;
NA: not applicable;
*the listing of multiple amino acids before, between, or after a slash indicate alternative amino acids that can be substituted at the position;
“-” indicates that any amino acid can be substituted for the corresponding amino acid indicated in the middle column

[0255] In some embodiments, the BPXTEN fusion protein can comprise spacer sequences that can further comprise one or more cleavage sequences configured to release the BP from the fusion protein when acted on by a protease. In some embodiments, the one or more cleavage sequences can be a sequence having at least about 80% (e.g., at least about 85%, at least about 90%, at least about 95%, at least about 96%, at least about 97%, at least about 98%, at least about 99%, or 100%) sequence identity to a sequence set forth in Table 7a.

[0256] In some embodiments, the disclosure provides BP release segment peptides (or release segment (RS)) that are substrates for one or more mammalian proteases associated with or produced by disease tissues or cells found in proximity to disease tissues. Such proteases can include, but not be limited to the classes of proteases such as metalloproteinases, cysteine proteases, aspartate proteases, and serine proteases, including, but not limited to, the proteases set forth in Table 7b. The RS are useful for, amongst other things, incorporation into the human or animal recombinant polypeptides, conferring a prodrug format that can be activated by the cleavage of the RS by mammalian proteases. As described herein, the RS are incorporated into the human or animal recombinant polypeptide compositions, linking the incorporated binding moieties to the XTEN (the configurations of which are described more fully, below) wherein upon cleavage of the RS by action of the one or more proteases for which the RS are substrates, the binding moieties and XTEN are released from the composition and the binding moieties, no longer shielded by the XTEN, regain their full potential to bind their ligands. In those recombinant polypeptide compositions comprising a first and a second antibody fragment, the compositions are also referred to herein as activatable antibody compositions (AAC).

TABLE 7b
Proteases of Target Tissues

| Class of Proteases | Protease |
|---|---|
| Metalloproteinases | Meprin |
| | Neprilysin (CD10) |
| | PSMA |
| | BMP-1 |
| | A disintegrin and metalloproteinases (ADAMs) |
| | ADAM8 |
| | ADAM9 |
| | ADAM10 |
| | ADAM12 |
| | ADAM15 |
| | ADAM17 (TACE) |
| | ADAM19 |
| | ADAM28 (MDC-L) |
| | ADAM with thrombospondin motifs (ADAMTS) |
| | ADAMTS1 |
| | ADAMTS4 |
| | ADAMTS5 |
| | Matrix Metalloproteinases (MMPs) |
| | MMP-1 (Collagenase 1) |
| | MMP-2 (Gelatinase A) |
| | MMP-3 (m1) |
| | MMP-7 (Matrilysin 1) |
| | MMP-8 (Collagenase 2) |
| | MMP-9 (Gelatinase B) |
| | MMP-10 (Stromelysin 2) |
| | MMP-11(Stromelysin 3) |
| | MMP-12 (Macrophage elastase) |
| | MMP-13 (Collagenase 3) |
| | MMP-14 (MT1-MMP) |
| | MMP-15 (MT2-MMP) |
| | MMP-19 |
| | MMP-23 (CA-MMP) |
| | MMP-24 (MT5-MMP) |
| | MMP-26 (Matrilysin 2 |
| | MMP-27 (CMMP) |
| Cysteine Proteases | Legumain |
| | Cysteine cathepsins |
| | Cathepsin B |
| | Cathepsin C |
| | Cathepsin K |
| | Cathepsin L |
| | Cathepsin S |
| | Cathespin X |
| Aspartate Proteases | Cathepsin D |
| | Cathepsin E |
| | Secretase |
| Serine Proteases | Urokinase (uPA) |
| | Tissue-type plasminogen activator (tPA) |
| | Plasmin |
| | Thrombin |
| | Prostate-specific antigen (PSA, KLK3) |
| | Human neutrophil elastase (HNE) |
| | Elastase |
| | Tryptase |
| | Type II transmembrane serine proteases (TTSPs) |
| | DESC1 |
| | Hepsin (HPN) |
| | Matriptase |
| | Matriptase-2 |
| | TMPRSS2 |
| | TMPRSS3 |
| | TMPRSS4 (CAP2) |
| | Fibroblast Activation Protein (FAP) |
| | kallikrein-related peptidase (KLK family) |
| | KLK4 |
| | KLK5 |
| | KLK6 |
| | KLK7 |
| | KLK8 |
| | KLK10 |
| | KLK11 |
| | KLK13 |
| | KLK14 |

[0257] In one embodiment, the disclosure provides activatable recombinant polypeptides comprising a first release segment (RS1) sequence having at least 88%, or at least 94%, or 100% sequence identity, when optimally aligned, to a sequence selected from the sequences set forth in Table 8a, wherein the RS1 is a substrate for one or more mammalian proteases. In other embodiments, the disclosure provides activatable recombinant polypeptides comprising a RS1 and a second release segment (RS2) sequence, each having at least 88%, or at least 94%, or 100% sequence identity, when optimally aligned, to a sequence selected from the sequences set forth in Table 8a, wherein the RS1 and the RS2 each are a substrate for one or more mammalian proteases. In another embodiment, disclosure provides activatable recombinant polypeptides comprising a first RS (RS1) sequence having at least 90%, at least 93%, at least 97%, or 100% identity, when optimally aligned, to a sequence selected from the sequences set forth in Table 8b, wherein the RS is a substrate for one or more mammalian proteases. In other embodiments, the disclosure provides activatable recombinant polypeptides comprising a RS1 and a second release segment (RS2) sequence, each having at least 88%, or at least 94%, or 100% sequence identity, when optimally aligned, to a sequence selected from the sequences set forth in Table 8b, wherein the RS1 and the RS2 are each a substrate for one or more mammalian proteases. In the embodiments of activatable recombinant polypeptides comprising RS1 and RS2, the two release segments can be identical or the sequences can be different.

[0258] The present disclosure contemplates release segments that are substrates for one, two or three different classes of proteases selected from metalloproteinases, cysteine proteases, aspartate proteases, and serine proteases, including the proteases set forth in Table 7b. In a particular feature, the RS serve as substrates for proteases found in close association with or are co-localized with disease tissues or cells, such as but not limited to tumors, cancer cells, and inflammatory tissues, and upon cleavage of the RS, the binding moieties that are otherwise shielded by the XTEN of the human or animal recombinant polypeptide compositions (and thus have a lower binding affinity for their respective ligands) are released from the composition and regain their full potential to bind the target and/or effector cell ligands. In another embodiment, the RS of the human or animal recombinant polypeptide compositions comprises an amino acid sequence that is a substrate for a cellular protease located within a targeted cell, including but not limited to the proteases set forth in Table 7b. In another particular feature of the human or animal recombinant polypeptide compositions, the RS that are substrates for two or three classes of proteases were designed with sequences that are capable of being cleaved in different locations of the RS sequence by the different proteases. Thus, the RS that are substrates for two, three, or more classes of proteases have two, three, or a plurality of distinct cleavage sites in the RS sequence, but cleavage by a single protease nevertheless results in the release of the binding moieties and the XTEN from the recombinant polypeptide composition comprising the RS.

[0259] In one embodiment, the RS of the disclosure for incorporation into the human or animal recombinant polypeptide compositions is a substrate for one or more proteases including meprin, neprilysin (CD10), PSMA, BMP-1, A disintegrin and metalloproteinases (ADAMs), ADAM8, ADAM9, ADAM10, ADAM12, ADAM15, ADAM17 (TACE), ADAM19, ADAM28 (MDC-L), ADAM with thrombospondin motifs (ADAMTS), ADAMTS1, ADAMTS4, ADAMTS5, MMP-1 (collagenase 1), matrix metalloproteinase-1 (MMP-1), matrix metalloproteinase-2 (MMP-2, gelatinase A), matrix metalloproteinase-3 (MMP-3, stromelysin 1), matrix metalloproteinase-7 (MMP-7, Matrilysin 1), matrix metalloproteinase-8 (MMP-8, collagenase 2), matrix metalloproteinase-9 (MMP-9, gelatinase B), matrix metalloproteinase-10 (MMP-10, stromelysin 2), matrix metalloproteinase-11 (MMP-11, stromelysin 3), matrix metalloproteinase-12 (MMP-12, macrophage elastase), matrix metalloproteinase-13 (MMP-13, collagenase 3), matrix metalloproteinase-14 (MMP-14, MT1-MMP), matrix metalloproteinase-15 (MMP-15, MT2-MMP), matrix metalloproteinase-19 (MMP-19), matrix metalloproteinase-23 (MMP-23, CA-MMP), matrix metalloproteinase-24 (MMP-24, MT5-MMP), matrix metalloproteinase-26 (MMP-26, matrilysin 2), matrix metalloproteinase-27 (MMP-27, CMMP), legumain, cathepsin B, cathepsin C, cathepsin K, cathepsin L, cathepsin S, cathepsin X, cathepsin D, cathepsin E, secretase, urokinase (uPA), tissue-type plasminogen activator (tPA), plasmin, thrombin, prostate-specific antigen (PSA, KLK3), human neutrophil elastase (HNE), elastase, tryptase, Type II transmembrane serine proteases (TTSPs), DESC1, hepsin (HPN), matriptase, matriptase-2, TMPRSS2, TMPRSS3, TMPRSS4 (CAP2), fibroblast activation protein (FAP), kallikrein-related peptidase (KLK family), KLK4, KLK5, KLK6, KLK7, KLK8, KLK10, KLK11, KLK13, and KLK14. In one embodiment, the RS is a substrate for ADAM17. In one embodiment, the RS is a substrate for BMP-1. In one embodiment, the RS is a substrate for cathepsin. In one embodiment, the RS is a substrate for HtrAl. In one embodiment, the RS is a substrate for legumain. In one embodiment, the RS is a substrate for MMP-1. In one embodiment, the RS is a substrate for MMP-2. In one embodiment, the RS is a substrate for MMP-7. In one embodiment, the RS is a substrate for MMP-9. In one embodiment, the RS is a substrate for MMP-11. In one embodiment, the RS is a substrate for MMP-14. In one embodiment, the RS is a substrate for uPA. In one embodiment, the RS is a substrate for matriptase. In one embodiment, the RS is a substrate for MT-SP1. In one embodiment, the RS is a substrate for neutrophil elastase. In one embodiment, the RS is a substrate for thrombin. In one embodiment RS is a substrate for TMPRSS3. In one embodiment, the RS is a substrate for TMPRSS4. In one embodiment, the RS of the human or animal recombinant polypeptide compositions is a substrate for at least two proteases that are legumain, MMP-1, MMP-2, MMP-7, MMP-9, MMP-11, MMP-14, uPA, and matriptase. In another embodiment, the RS of the human or animal recombinant polypeptide compositions is a substrate for legumain, MMP-1, MMP-2, MMP-7, MMP-9, MMP-11, MMP-14, uPA, and matriptase.

TABLE 8a
BP Release Segment Sequences.

| Name | Construct ID | Amino Acid Sequence | SEQ ID NO: |
|---|---|---|---|
| RSR-1517 | AC1611 | EAGRSANHEPLGLVAT | 8261 |
| BSRS-A1 | AC1605 | ASGRSTNAGPSGLAGP | 8262 |
| BSRS-A2 | AC1606 | ASGRSTNAGPQGLAGQ | 8263 |
| BSRS-A3 | AC1607 | ASGRSTNAGPPGLTGP | 8264 |
| VP-1 | AC1608 | ASSRGTNAGPAGLTGP | 8265 |
| RSR-1752 | AC1609 | ASSRTTNTGPSTLTGP | 8266 |
| RSR-1512 | AC1610 | AAGRSDNGTPLELVAP | 8267 |
| RSR-1517 | AC1611 | EAGRSANHEPLGLVAT | 8261 |
| VP-2 | AC1612 | ASGRGTNAGPAGLTGP | 8268 |
| RSR-1018 | AC1613 | LFGRNDNHEPLELGGG | 8269 |
| RSR-1053 | AC1614 | TAGRSDNLEPLGLVFG | 8270 |
| RSR-1059 | AC1615 | LDGRSDNFHPPELVAG | 8271 |
| RSR-1065 | AC1616 | LEGRSDNEEPENLVAG | 8272 |
| RSR-1167 | AC1617 | LKGRSDNNAPLALVAG | 8273 |
| RSR-1201 | AC1618 | VYSRGTNAGPHGLTGR | 8274 |
| RSR-1218 | AC1619 | ANSRGTNKGFAGLIGP | 8275 |
| RSR-1226 | AC1620 | ASSRLTNEAPAGLTIP | 8276 |
| RSR-1254 | AC1621 | DQSRGTNAGPEGLTDP | 8277 |
| RSR-1256 | AC1622 | ESSRGTNIGQGGLTGP | 8278 |
| RSR-1261 | AC1623 | SSSRGTNQDPAGLTIP | 8279 |
| RSR-1293 | AC1624 | ASSRGQNHSPMGLTGP | 8280 |
| RSR-1309 | AC1625 | AYSRGPNAGPAGLEGR | 8281 |
| RSR-1326 | AC1626 | ASERGNNAGPANLTGF | 8282 |
| RSR-1345 | AC1627 | ASHRGTNPKPAILTGP | 8283 |
| RSR-1354 | AC1628 | MSSRRTNANPAQLTGP | 8284 |
| RSR-1426 | AC1629 | GAGRTDNHEPLELGAA | 8285 |
| RSR-1478 | AC1630 | LAGRSENTAPLELTAG | 8286 |
| RSR-1479 | AC1631 | LEGRPDNHEPLALVAS | 8287 |
| RSR-1496 | AC1632 | LSGRSDNEEPLALPAG | 8288 |
| RSR-1508 | AC1633 | EAGRTDNHEPLELSAP | 8289 |
| RSR-1513 | AC1634 | EGGRSDNHGPLELVSG | 8290 |
| RSR-1516 | AC1635 | LSGRSDNEAPLELEAG | 8291 |
| RSR-1524 | AC1636 | LGGRADNHEPPELGAG | 8292 |
| RSR-1622 | AC1637 | PPSRGTNAEPAGLTGE | 8293 |
| RSR-1629 | AC1638 | ASTRGENAGPAGLEAP | 8294 |
| RSR-1664 | AC1639 | ESSRGTNGAPEGLTGP | 8295 |
| RSR-1667 | AC1640 | ASSRATNESPAGLTGE | 8296 |
| RSR-1709 | AC1641 | ASSRGENPPPGGLTGP | 8297 |
| RSR-1712 | AC1642 | AASRGTNTGPAELTGS | 8298 |
| RSR-1727 | AC1643 | AGSRTTNAGPGGLEGP | 8299 |
| RSR-1754 | AC1644 | APSRGENAGPATLTGA | 8300 |
| RSR-1819 | AC1645 | ESGRAANTGPPTLTAP | 8301 |
| RSR-1832 | AC1646 | NPGRAANEGPPGLPGS | 8302 |
| RSR-1855 | AC1647 | ESSRAANLTPPELTGP | 8303 |
| RSR-1911 | AC1648 | ASGRAANETPPGLTGA | 8304 |
| RSR-1929 | AC1649 | NSGRGENLGAPGLTGT | 8305 |
| RSR-1951 | AC1650 | TTGRAANLTPAGLTGP | 8306 |
| RSR-2295 | AC1761 | EAGRSANHTPAGLTGP | 8307 |
| RSR-2298 | AC1762 | ESGRAANTTPAGLTGP | 8308 |
| RSR-2038 | AC1679 | TTGRATEAANLTPAGLTGP | 8309 |
| RSR-2072 | AC1680 | TTGRAEEAANLTPAGLTGP | 8310 |
| RSR-2089 | AC1681 | TTGRAGEAANLTPAGLTGP | 8311 |
| RSR-2302 | AC1682 | TTGRATEAANATPAGLTGP | 8312 |
| RSR-3047 | AC1697 | TTGRAGEAEGATSAGATGP | 8313 |
| RSR-3052 | AC1698 | TTGEAGEAANATSAGATGP | 8314 |
| RSR-3043 | AC1699 | TTGEAGEAAGLTPAGLTGP | 8315 |
| RSR-3041 | AC1700 | TTGAAGEAANATPAGLTGP | 8316 |
| RSR-3044 | AC1701 | TTGRAGEAAGLTPAGLTGP | 8317 |
| RSR-3057 | AC1702 | TTGRAGEAANATSAGATGP | 8318 |
| RSR-3058 | AC1703 | TTGEAGEAAGATSAGATGP | 8319 |
| RSR-2485 | AC1763 | ESGRAANTEPPELGAG | 8320 |
| RSR-2486 | AC1764 | ESGRAANTAPEGLTGP | 8321 |
| RSR-2488 | AC1688 | EPGRAANHEPSGLTEG | 8322 |
| RSR-2599 | AC1706 | ESGRAANHTGAPPGGLTGP | 8323 |
| RSR-2706 | AC1716 | TTGRTGEGANATPGGLTGP | 8324 |
| RSR-2707 | AC1717 | RTGRSGEAANETPEGLEGP | 8325 |
| RSR-2708 | AC1718 | RTGRTGESANETPAGLGGP | 8326 |
| RSR-2709 | AC1719 | STGRTGEPANETPAGLSGP | 8327 |
| RSR-2710 | AC1720 | TTGRAGEPANATPTGLSGP | 8328 |
| RSR-2711 | AC1721 | RTGRPGEGANATPTGLPGP | 8329 |
| RSR-2712 | AC1722 | RTGRGGEAANATPSGLGGP | 8330 |
| RSR-2713 | AC1723 | STGRSGESANATPGGLGGP | 8331 |
| RSR-2714 | AC1724 | RTGRTGEEANATPAGLPGP | 8332 |
| RSR-2715 | AC1725 | ATGRPGEPANTTPEGLEGP | 8333 |
| RSR-2716 | AC1726 | STGRSGEPANATPGGLTGP | 8334 |
| RSR-2717 | AC1727 | PTGRGGEGANTTPTGLPGP | 8335 |
| RSR-2718 | AC1728 | PTGRSGEGANATPSGLTGP | 8336 |
| RSR-2719 | AC1729 | TTGRASEGANSTPAPLTEP | 8337 |
| RSR-2720 | AC1730 | TYGRAAEAANTTPAGLTAP | 8338 |
| RSR-2721 | AC1731 | TTGRATEGANATPAELTEP | 8339 |
| RSR-2722 | AC1732 | TVGRASEEANTTPASLTGP | 8340 |
| RSR-2723 | AC1733 | TTGRAPEAANATPAPLTGP | 8341 |
| RSR-2724 | AC1734 | TWGRATEPANATPAPLTSP | 8342 |
| RSR-2725 | AC1735 | TVGRASESANATPAELTSP | 8343 |
| RSR-2726 | AC1736 | TVGRAPEGANSTPAGLTGP | 8344 |
| RSR-2727 | AC1737 | TWGRATEAPNLEPATLTTP | 8345 |
| RSR-2728 | AC1738 | TTGRATEAPNLTPAPLTEP | 8346 |
| RSR-2729 | AC1739 | TOGRATEAPNLSPAALTSP | 8347 |
| RSR-2730 | AC1740 | TOGRAAEAPNLTPATLTAP | 8348 |
| RSR-2731 | AC1741 | TSGRAPEATNLAPAPLTGP | 8349 |
| RSR-2732 | AC1742 | TOGRAAEAANLTPAGLTEP | 8350 |
| RSR-2733 | AC1743 | TTGRAGSAPNLPPTGLTTP | 8351 |
| RSR-2734 | AC1744 | TTGRAGGAENLPPEGLTAP | 8352 |
| RSR-2735 | AC1745 | TTSRAGTATNLTPEGLTAP | 8353 |
| RSR-2736 | AC1746 | TTGRAGTATNLPPSGLTTP | 8354 |
| RSR-2737 | AC1747 | TTARAGEAENLSPSGLTAP | 8355 |
| RSR-2738 | AC1748 | TTGRAGGAGNLAPGGLTEP | 8356 |
| RSR-2739 | AC1749 | TTGRAGTATNLPPEGLTGP | 8357 |
| RSR-2740 | AC1750 | TTGRAGGAANLAPTGLTEP | 8358 |
| RSR-2741 | AC1751 | TTGRAGTAENLAPSGLTTP | 8359 |
| RSR-2742 | AC1752 | TTGRAGSATNLGPGGLTGP | 8360 |
| RSR-2743 | AC1753 | TTARAGGAENLTPAGLTEP | 8361 |
| RSR-2744 | AC1754 | TTARAGSAENLSPSGLTGP | 8362 |
| RSR-2745 | AC1755 | TTARAGGAGNLAPEGLTTP | 8363 |
| RSR-2746 | AC1756 | TTSRAGAAENLTPTGLTGP | 8364 |
| RSR-2747 | AC1757 | TYGRTTTPGNEPPASLEAE | 8365 |
| RSR-2748 | AC1758 | TYSRGESGPNEPPPGLTGP | 8366 |
| RSR-2749 | AC1759 | AWGRTGASENETPAPLGGE | 8367 |
| RSR-2750 | AC1760 | RWGRAETTPNTPPEGLETE | 8368 |
| RSR-2751 | AC1765 | ESGRAANHTGAEPPELGAG | 8369 |
| RSR-2754 | AC1801 | TTGRAGEAANLTPAGLTES | 8370 |
| RSR-2755 | AC1802 | TTGRAGEAANLTPAALTES | 8371 |
| RSR-2756 | AC1803 | TTGRAGEAANLTPAPLTES | 8372 |
| RSR-2757 | AC1804 | TTGRAGEAANLTPEPLTES | 8373 |
| RSR-2758 | AC1805 | TTGRAGEAANLTPAGLTGA | 8374 |
| RSR-2759 | AC1806 | TTGRAGEAANLTPEGLTGA | 8375 |
| RSR-2760 | AC1807 | TTGRAGEAANLTPEPLTGA | 8376 |
| RSR-2761 | AC1808 | TTGRAGEAANLTPAGLTEA | 8377 |
| RSR-2762 | AC1809 | TTGRAGEAANLTPEGLTEA | 8378 |
| RSR-2763 | AC1810 | TTGRAGEAANLTPAPLTEA | 8379 |
| RSR-2764 | AC1811 | TTGRAGEAANLTPEPLTEA | 8380 |
| RSR-2765 | AC1812 | TTGRAGEAANLTPEPLTGP | 8381 |
| RSR-2766 | AC1813 | TTGRAGEAANLTPAGLTGG | 8382 |
| RSR-2767 | AC1814 | TTGRAGEAANLTPEGLTGG | 8383 |
| RSR-2768 | AC1815 | TTGRAGEAANLTPEALTGG | 8384 |
| RSR-2769 | AC1816 | TTGRAGEAANLTPEPLTGG | 8385 |
| RSR-2770 | AC1817 | TTGRAGEAANLTPAGLTEG | 8386 |
| RSR-2771 | AC1818 | TTGRAGEAANLTPEGLTEG | 8387 |
| RSR-2772 | AC1819 | TTGRAGEAANLTPAPLTEG | 8388 |
| RSR-2773 | AC1820 | TTGRAGEAANLTPEPLTEG | 8389 |

TABLE 8b
Release Segment Sequences

| | | SEQ ID | | | SEQ ID |
|---|---|---|---|---|---|
| Name | Amino Acid Sequence | NO: | Name | Amino Acid Sequence | NO: |
| RSN-0001 | GSAPGSAGGYAELRMGGAI | 8390 | RSC-0001 | GTAEAASASGGSAGGYAEL | 8635 |
| | ATSGSETPGT | | | RMGGAIPGSP | |
| RSN-0002 | GSAPGTGGGYAPLRMGGGA | 8391 | RSC-0002 | GTAEAASASGGTGGGYAPL | 8636 |
| | ATSGSETPGT | | | RMGGGAPGSP | |
| RSN-0003 | GSAPGAEGGYAALRMGGEI | 8392 | RSC-0003 | GTAEAASASGGAEGGYAAL | 8637 |
| | ATSGSETPGT | | | RMGGEIPGSP | |
| RSN-0004 | GSAPGGPGGYALLRMGGPA | 8393 | RSC-0004 | GTAEAASASGGGPGGYALL | 8638 |
| | ATSGSETPGT | | | RMGGPAPGSP | |
| RSN-0005 | GSAPGEAGGYAFLRMGGSI | 8394 | RSC-0005 | GTAEAASASGGEAGGYAFL | 8639 |
| | ATSGSETPGT | | | RMGGSIPGSP | |
| RSN-0006 | GSAPGPGGGYASLRMGGTA | 8395 | RSC-0006 | GTAEAASASGGPGGGYASL | 8640 |
| | ATSGSETPGT | | | RMGGTAPGSP | |
| RSN-0007 | GSAPGSEGGYATLRMGGAI | 8396 | RSC-0007 | GTAEAASASGGSEGGYATL | 8641 |
| | ATSGSETPGT | | | RMGGAIPGSP | |
| RSN-0008 | GSAPGTPGGYANLRMGGGA | 8397 | RSC-0008 | GTAEAASASGGTPGGYANL | 8642 |
| | ATSGSETPGT | | | RMGGGAPGSP | |
| RSN-0009 | GSAPGASGGYAHLRMGGEI | 8398 | RSC-0009 | GTAEAASASGGASGGYAHL | 8643 |
| | ATSGSETPGT | | | RMGGEIPGSP | |
| RSN-0010 | GSAPGGTGGYGELRMGGPA | 8399 | RSC-0010 | GTAEAASASGGGTGGYGEL | 8644 |
| | ATSGSETPGT | | | RMGGPAPGSP | |
| RSN-0011 | GSAPGEAGGYPELRMGGSIA | 8400 | RSC-0011 | GTAEAASASGGEAGGYPEL | 8645 |
| | TSGSETPGT | | | RMGGSIPGSP | |
| RSN-0012 | GSAPGPGGGYVELRMGGTA | 8401 | RSC-0012 | GTAEAASASGGPGGGYVEL | 8646 |
| | ATSGSETPGT | | | RMGGTAPGSP | |
| RSN-0013 | GSAPGSEGGYLELRMGGAI | 8402 | RSC-0013 | GTAEAASASGGSEGGYLELR | 8647 |
| | ATSGSETPGT | | | MGGAIPGSP | |
| RSN-0014 | GSAPGTPGGYSELRMGGGA | 8403 | RSC-0014 | GTAEAASASGGTPGGYSELR | 8648 |
| | ATSGSETPGT | | | MGGGAPGSP | |
| RSN-0015 | GSAPGASGGYTELRMGGEI | 8404 | RSC-0015 | GTAEAASASGGASGGYTEL | 8649 |
| | ATSGSETPGT | | | RMGGEIPGSP | |
| RSN-0016 | GSAPGGTGGYQELRMGGPA | 8405 | RSC-0016 | GTAEAASASGGGTGGYQEL | 8650 |
| | ATSGSETPGT | | | RMGGPAPGSP | |
| RSN-0017 | GSAPGEAGGYEELRMGGSI | 8406 | RSC-0017 | GTAEAASASGGEAGGYEEL | 8651 |
| | ATSGSETPGT | | | RMGGSIPGSP | |
| RSN-0018 | GSAPGPGIGPAELRMGGTAA | 8407 | RSC-0018 | GTAEAASASGGPGIGPAELR | 8652 |
| | TSGSETPGT | | | MGGTAPGSP | |
| RSN-0019 | GSAPGSEIGAAELRMGGAIA | 8408 | RSC-0019 | GTAEAASASGGSEIGAAELR | 8653 |
| | TSGSETPGT | | | MGGAIPGSP | |
| RSN-0020 | GSAPGTPIGSAELRMGGGAA | 8409 | RSC-0020 | GTAEAASASGGTPIGSAELR | 8654 |
| | TSGSETPGT | | | MGGGAPGSP | |
| RSN-0021 | GSAPGASIGTAELRMGGEIA | 8410 | RSC-0021 | GTAEAASASGGASIGTAELR | 8655 |
| | TSGSETPGT | | | MGGEIPGSP | |
| RSN-0022 | GSAPGGTIGNAELRMGGPA | 8411 | RSC-0022 | GTAEAASASGGGTIGNAELR | 8656 |
| | ATSGSETPGT | | | MGGPAPGSP | |
| RSN-0023 | GSAPGEAIGQAELRMGGSIA | 8412 | RSC-0023 | GTAEAASASGGEAIGQAELR | 8657 |
| | TSGSETPGT | | | MGGSIPGSP | |
| RSN-0024 | GSAPGPGGPYAELRMGGTA | 8413 | RSC-0024 | GTAEAASASGGPGGPYAELR | 8658 |
| | ATSGSETPGT | | | MGGTAPGSP | |
| RSN-0025 | GSAPGSEGAYAELRMGGAI | 8414 | RSC-0025 | GTAEAASASGGSEGAYAEL | 8659 |
| | ATSGSETPGT | | | RMGGAIPGSP | |
| RSN-0026 | GSAPGTPGVYAELRMGGGA | 8415 | RSC-0026 | GTAEAASASGGTPGVYAEL | 8660 |
| | ATSGSETPGT | | | RMGGGAPGSP | |
| RSN-0027 | GSAPGASGLYAELRMGGEI | 8416 | RSC-0027 | GTAEAASASGGASGLYAEL | 8661 |
| | ATSGSETPGT | | | RMGGEIPGSP | |
| RSN-0028 | GSAPGGTGIYAELRMGGPA | 8417 | RSC-0028 | GTAEAASASGGGTGIYAELR | 8662 |
| | ATSGSETPGT | | | MGGPAPGSP | |
| RSN-0029 | GSAPGEAGFYAELRMGGSIA | 8418 | RSC-0029 | GTAEAASASGGEAGFYAEL | 8663 |
| | TSGSETPGT | | | RMGGSIPGSP | |
| RSN-0030 | GSAPGPGGYYAELRMGGTA | 8419 | RSC-0030 | GTAEAASASGGPGGYYAEL | 8664 |
| | ATSGSETPGT | | | RMGGTAPGSP | |
| RSN-0031 | GSAPGSEGSYAELRMGGAIA | 8420 | RSC-0031 | GTAEAASASGGSEGSYAELR | 8665 |
| | TSGSETPGT | | | MGGAIPGSP | |
| RSN-0032 | GSAPGTPGNYAELRMGGGA | 8421 | RSC-0032 | GTAEAASASGGTPGNYAEL | 8666 |
| | ATSGSETPGT | | | RMGGGAPGSP | |
| RSN-0033 | GSAPGASGEYAELRMGGEI | 8422 | RSC-0033 | GTAEAASASGGASGEYAEL | 8667 |
| | ATSGSETPGT | | | RMGGEIPGSP | |
| RSN-0034 | GSAPGGTGHYAELRMGGPA | 8423 | RSC-0034 | GTAEAASASGGGTGHYAEL | 8668 |
| | ATSGSETPGT | | | RMGGPAPGSP | |
| RSN-0035 | GSAPGEAGGYAEARMGGSI | 8424 | RSC-0035 | GTAEAASASGGEAGGYAEA | 8669 |
| | ATSGSETPGT | | | RMGGSIPGSP | |
| RSN-0036 | GSAPGPGGGYAEVRMGGTA | 8425 | RSC-0036 | GTAEAASASGGPGGGYAEV | 8670 |
| | ATSGSETPGT | | | RMGGTAPGSP | |
| RSN-0037 | GSAPGSEGGYAEIRMGGAIA | 8426 | RSC-0037 | GTAEAASASGGSEGGYAEIR | 8671 |
| | TSGSETPGT | | | MGGAIPGSP | |
| RSN-0038 | GSAPGTPGGYAEFRMGGGA | 8427 | RSC-0038 | GTAEAASASGGTPGGYAEFR | 8672 |
| | ATSGSETPGT | | | MGGGAPGSP | |
| RSN-0039 | GSAPGASGGYAEYRMGGEI | 8428 | RSC-0039 | GTAEAASASGGASGGYAEY | 8673 |
| | ATSGSETPGT | | | RMGGEIPGSP | |
| RSN-0040 | GSAPGGTGGYAESRMGGPA | 8429 | RSC-0040 | GTAEAASASGGGTGGYAES | 8674 |
| | ATSGSETPGT | | | RMGGPAPGSP | |
| RSN-0041 | GSAPGEAGGYAETRMGGSI | 8430 | RSC-0041 | GTAEAASASGGEAGGYAET | 8675 |
| | ATSGSETPGT | | | RMGGSIPGSP | |
| RSN-0042 | GSAPGPGGGYAELAMGGTR | 8431 | RSC-0042 | GTAEAASASGGPGGGYAEL | 8676 |
| | ATSGSETPGT | | | AMGGTRPGSP | |
| RSN-0043 | GSAPGSEGGYAELVMGGAR | 8432 | RSC-0043 | GTAEAASASGGSEGGYAEL | 8677 |
| | ATSGSETPGT | | | VMGGARPGSP | |
| RSN-0044 | GSAPGTPGGYAELLMGGGR | 8433 | RSC-0044 | GTAEAASASGGTPGGYAELL | 8678 |
| | ATSGSETPGT | | | MGGGRPGSP | |
| RSN-0045 | GSAPGASGGYAELIMGGER | 8434 | RSC-0045 | GTAEAASASGGASGGYAELI | 8679 |
| | ATSGSETPGT | | | MGGERPGSP | |
| RSN-0046 | GSAPGGTGGYAELWMGGP | 8435 | RSC-0046 | GTAEAASASGGGTGGYAEL | 8680 |
| | RATSGSETPGT | | | WMGGPRPGSP | |
| RSN-0047 | GSAPGEAGGYAELSMGGSR | 8436 | RSC-0047 | GTAEAASASGGEAGGYAEL | 8681 |
| | ATSGSETPGT | | | SMGGSRPGSP | |
| RSN-0048 | GSAPGPGGGYAELTMGGTR | 8437 | RSC-0048 | GTAEAASASGGPGGGYAEL | 8682 |
| | ATSGSETPGT | | | TMGGTRPGSP | |
| RSN-0049 | GSAPGSEGGYAELQMGGAR | 8438 | RSC-0049 | GTAEAASASGGSEGGYAEL | 8683 |
| | ATSGSETPGT | | | QMGGARPGSP | |
| RSN-0050 | GSAPGTPGGYAELNMGGGR | 8439 | RSC-0050 | GTAEAASASGGTPGGYAEL | 8684 |
| | ATSGSETPGT | | | NMGGGRPGSP | |
| RSN-0051 | GSAPGASGGYAELEMGGER | 8440 | RSC-0051 | GTAEAASASGGASGGYAEL | 8685 |
| | ATSGSETPGT | | | EMGGERPGSP | |
| RSN-0052 | GSAPGGTGGYAELRPGGPIA | 8441 | RSC-0052 | GTAEAASASGGGTGGYAEL | 8686 |
| | TSGSETPGT | | | RPGGPIPGSP | |
| RSN-0053 | GSAPGEAGGYAELRAGGSA | 8442 | RSC-0053 | GTAEAASASGGEAGGYAEL | 8687 |
| | ATSGSETPGT | | | RAGGSAPGSP | |
| RSN-0054 | GSAPGPGGGYAELRLGGTIA | 8443 | RSC-0054 | GTAEAASASGGPGGGYAEL | 8688 |
| | TSGSETPGT | | | RLGGTIPGSP | |
| RSN-0055 | GSAPGSEGGYAELRIGGAAA | 8444 | RSC-0055 | GTAEAASASGGSEGGYAEL | 8689 |
| | TSGSETPGT | | | RIGGAAPGSP | |
| RSN-0056 | GSAPGTPGGYAELRSGGGIA | 8445 | RSC-0056 | GTAEAASASGGTPGGYAEL | 8690 |
| | TSGSETPGT | | | RSGGGIPGSP | |
| RSN-0057 | GSAPGASGGYAELRNGGEA | 8446 | RSC-0057 | GTAEAASASGGASGGYAEL | 8691 |
| | ATSGSETPGT | | | RNGGEAPGSP | |
| RSN-0058 | GSAPGGTGGYAELRQGGPIA | 8447 | RSC-0058 | GTAEAASASGGGTGGYAEL | 8692 |
| | TSGSETPGT | | | ROGGPIPGSP | |
| RSN-0059 | GSAPGEAGGYAELRDGGSA | 8448 | RSC-0059 | GTAEAASASGGEAGGYAEL | 8693 |
| | ATSGSETPGT | | | RDGGSAPGSP | |
| RSN-0060 | GSAPGPGGGYAELREGGTIA | 8449 | RSC-0060 | GTAEAASASGGPGGGYAEL | 8694 |
| | TSGSETPGT | | | REGGTIPGSP | |
| RSN-0061 | GSAPGSEGGYAELRHGGAA | 8450 | RSC-0061 | GTAEAASASGGSEGGYAEL | 8695 |
| | ATSGSETPGT | | | RHGGAAPGSP | |
| RSN-0062 | GSAPGTPGGYAELRMPGGIA | 8451 | RSC-0062 | GTAEAASASGGTPGGYAEL | 8696 |
| | TSGSETPGT | | | RMPGGIPGSP | |
| RSN-0063 | GSAPGASGGYAELRMAGEA | 8452 | RSC-0063 | GTAEAASASGGASGGYAEL | 8697 |
| | ATSGSETPGT | | | RMAGEAPGSP | |
| RSN-0064 | GSAPGGTGGYAELRMVGPI | 8453 | RSC-0064 | GTAEAASASGGGTGGYAEL | 8698 |
| | ATSGSETPGT | | | RMVGPIPGSP | |
| RSN-0065 | GSAPGEAGGYAELRMLGSA | 8454 | RSC-0065 | GTAEAASASGGEAGGYAEL | 8699 |
| | ATSGSETPGT | | | RMLGSAPGSP | |
| RSN-0066 | GSAPGPGGGYAELRMIGTIA | 8455 | RSC-0066 | GTAEAASASGGPGGGYAEL | 8700 |
| | TSGSETPGT | | | RMIGTIPGSP | |
| RSN-0067 | GSAPGSEGGYAELRMYGAI | 8456 | RSC-0067 | GTAEAASASGGSEGGYAEL | 8701 |
| | ATSGSETPGT | | | RMYGAIPGSP | |
| RSN-0068 | GSAPGTPGGYAELRMSGGA | 8457 | RSC-0068 | GTAEAASASGGTPGGYAEL | 8702 |
| | ATSGSETPGT | | | RMSGGAPGSP | |
| RSN-0069 | GSAPGASGGYAELRMNGEI | 8458 | RSC-0069 | GTAEAASASGGASGGYAEL | 8703 |
| | ATSGSETPGT | | | RMNGEIPGSP | |
| RSN-0070 | GSAPGGTGGYAELRMQGPA | 8459 | RSC-0070 | GTAEAASASGGGTGGYAEL | 8704 |
| | ATSGSETPGT | | | RMQGPAPGSP | |
| RSN-0071 | GSAPGANHTPAGLTGPGAR | 8460 | RSC-0071 | GTAEAASASGGANHTPAGL | 8705 |
| | ATSGSETPGT | | | TGPGARPGSP | |
| RSN-0072 | GSAPGANTAPEGLTGPSTRA | 8461 | RSC-0072 | GTAEAASASGGANTAPEGLT | 8706 |
| | TSGSETPGT | | | GPSTRPGSP | |
| RSN-0073 | GSAPGTGAPPGGLTGPGTRA | 8462 | RSC-0073 | GTAEAASASGGTGAPPGGLT | 8707 |
| | TSGSETPGT | | | GPGTRPGSP | |
| RSN-0074 | GSAPGANHEPSGLTEGSPRA | 8463 | RSC-0074 | GTAEAASASGGANHEPSGLT | 8708 |
| | TSGSETPGT | | | EGSPRPGSP | |
| RSN-0075 | GSAPGANTEPPELGAGTERA | 8464 | RSC-0075 | GTAEAASASGGANTEPPELG | 8709 |
| | TSGSETPGT | | | AGTERPGSP | |
| RSN-0076 | GSAPGASGPPPGLTGPPGRA | 8465 | RSC-0076 | GTAEAASASGGASGPPPGLT | 8710 |
| | TSGSETPGT | | | GPPGRPGSP | |
| RSN-0077 | GSAPGASGTPAPLGGEPGRA | 8466 | RSC-0077 | GTAEAASASGGASGTPAPLG | 8711 |
| | TSGSETPGT | | | GEPGRPGSP | |
| RSN-0078 | GSAPGPAGPPEGLETEAGRA | 8467 | RSC-0078 | GTAEAASASGGPAGPPEGLE | 8712 |
| | TSGSETPGT | | | TEAGRPGSP | |
| RSN-0079 | GSAPGPTSGQGGLTGPESRA | 8468 | RSC-0079 | GTAEAASASGGPTSGQGGLT | 8713 |
| | TSGSETPGT | | | GPESRPGSP | |
| RSN-0080 | GSAPGSAGGAANLVRGGAI | 8469 | RSC-0080 | GTAEAASASGGSAGGAANL | 8714 |
| | ATSGSETPGT | | | VRGGAIPGSP | |
| RSN-0081 | GSAPGTGGGAAPLVRGGGA | 8470 | RSC-0081 | GTAEAASASGGTGGGAAPL | 8715 |
| | ATSGSETPGT | | | VRGGGAPGSP | |
| RSN-0082 | GSAPGAEGGAAALVRGGEI | 8471 | RSC-0082 | GTAEAASASGGAEGGAAAL | 8716 |
| | ATSGSETPGT | | | VRGGEIPGSP | |
| RSN-0083 | GSAPGGPGGAALLVRGGPA | 8472 | RSC-0083 | GTAEAASASGGGPGGAALL | 8717 |
| | ATSGSETPGT | | | VRGGPAPGSP | |
| RSN-0084 | GSAPGEAGGAAFLVRGGSIA | 8473 | RSC-0084 | GTAEAASASGGEAGGAAFL | 8718 |
| | TSGSETPGT | | | VRGGSIPGSP | |
| RSN-0085 | GSAPGPGGGAASLVRGGTA | 8474 | RSC-0085 | GTAEAASASGGPGGGAASL | 8719 |
| | ATSGSETPGT | | | VRGGTAPGSP | |
| RSN-0086 | GSAPGSEGGAATLVRGGAIA | 8475 | RSC-0086 | GTAEAASASGGSEGGAATL | 8720 |
| | TSGSETPGT | | | VRGGAIPGSP | |
| RSN-0087 | GSAPGTPGGAAGLVRGGGA | 8476 | RSC-0087 | GTAEAASASGGTPGGAAGL | 8721 |
| | ATSGSETPGT | | | VRGGGAPGSP | |
| RSN-0088 | GSAPGASGGAADLVRGGEI | 8477 | RSC-0088 | GTAEAASASGGASGGAADL | 8722 |
| | ATSGSETPGT | | | VRGGEIPGSP | |
| RSN-0089 | GSAPGGTGGAGNLVRGGPA | 8478 | RSC-0089 | GTAEAASASGGGTGGAGNL | 8723 |
| | ATSGSETPGT | | | VRGGPAPGSP | |
| RSN-0090 | GSAPGEAGGAPNLVRGGSIA | 8479 | RSC-0090 | GTAEAASASGGEAGGAPNL | 8724 |
| | TSGSETPGT | | | VRGGSIPGSP | |
| RSN-0091 | GSAPGPGGGAVNLVRGGTA | 8480 | RSC-0091 | GTAEAASASGGPGGGAVNL | 8725 |
| | ATSGSETPGT | | | VRGGTAPGSP | |
| RSN-0092 | GSAPGSEGGALNLVRGGAIA | 8481 | RSC-0092 | GTAEAASASGGSEGGALNL | 8726 |
| | TSGSETPGT | | | VRGGAIPGSP | |
| RSN-0093 | GSAPGTPGGASNLVRGGGA | 8482 | RSC-0093 | GTAEAASASGGTPGGASNL | 8727 |
| | ATSGSETPGT | | | VRGGGAPGSP | |
| RSN-0094 | GSAPGASGGATNLVRGGEIA | 8483 | RSC-0094 | GTAEAASASGGASGGATNL | 8728 |
| | TSGSETPGT | | | VRGGEIPGSP | |
| RSN-0095 | GSAPGGTGGAQNLVRGGPA | 8484 | RSC-0095 | GTAEAASASGGGTGGAQNL | 8729 |
| | ATSGSETPGT | | | VRGGPAPGSP | |
| RSN-0096 | GSAPGEAGGAENLVRGGSIA | 8485 | RSC-0096 | GTAEAASASGGEAGGAENL | 8730 |
| | TSGSETPGT | | | VRGGSIPGSP | |
| RSN-1517 | GSAPEAGRSANHEPLGLVAT | 8486 | RSC-1517 | GTAEAASASGEAGRSANHEP | 8731 |
| | ATSGSETPGT | | | LGLVATPGSP | |
| BSRS-A1 | GSAPASGRSTNAGPSGLAGP | 8487 | BSRS-A1 | GTAEAASASGASGRSTNAGP | 8732 |
| | ATSGSETPGT | | | SGLAGPPGSP | |
| BSRS-A2 | GSAPASGRSTNAGPQGLAG | 8488 | BSRS-A2 | GTAEAASASGASGRSTNAGP | 8733 |
| | QATSGSETPGT | | | QGLAGQPGSP | |
| BSRS-A3 | GSAPASGRSTNAGPPGLTGP | 8489 | BSRS-A3 | GTAEAASASGASGRSTNAGP | 8734 |
| | ATSGSETPGT | | | PGLTGPPGSP | |
| VP-1 | GSAPASSRGTNAGPAGLTGP | 8490 | VP-1 | GTAEAASASGASSRGTNAGP | 8735 |
| | ATSGSETPGT | | | AGLTGPPGSP | |
| RSN-1752 | GSAPASSRTTNTGPSTLTGP | 8491 | RSC-1752 | GTAEAASASGASSRTTNTGP | 8736 |
| | ATSGSETPGT | | | STLTGPPGSP | |
| RSN-1512 | GSAPAAGRSDNGTPLELVAP | 8492 | RSC-1512 | GTAEAASASGAAGRSDNGT | 8737 |
| | ATSGSETPGT | | | PLEL VAPPGSP | |
| RSN-1517 | GSAPEAGRSANHEPLGLVAT | 8486 | RSC-1517 | GTAEAASASGEAGRSANHEP | 8731 |
| | ATSGSETPGT | | | LGLVATPGSP | |
| VP-2 | GSAPASGRGTNAGPAGLTG | 8493 | VP-2 | GTAEAASASGASGRGTNAG | 8738 |
| | PATSGSETPGT | | | PAGLTGPPGSP | |
| RSN-1018 | GSAPLFGRNDNHEPLELGGG | 8494 | RSC-1018 | GTAEAASASGLFGRNDNHEP | 8739 |
| | ATSGSETPGT | | | LELGGGPGSP | |
| RSN-1053 | GSAPTAGRSDNLEPLGLVFG | 8495 | RSC-1053 | GTAEAASASGTAGRSDNLEP | 8740 |
| | ATSGSETPGT | | | LGLVFGPGSP | |
| RSN-1059 | GSAPLDGRSDNFHPPELVAG | 8496 | RSC-1059 | GTAEAASASGLDGRSDNFHP | 8741 |
| | ATSGSETPGT | | | PEL VAGPGSP | |
| RSN-1065 | GSAPLEGRSDNEEPENLVAG | 8497 | RSC-1065 | GTAEAASASGLEGRSDNEEP | 8742 |
| | ATSGSETPGT | | | ENLVAGPGSP | |
| RSN-1167 | GSAPLKGRSDNNAPLALVA | 8498 | RSC-1167 | GTAEAASASGLKGRSDNNA | 8743 |
| | GATSGSETPGT | | | PLALVAGPGSP | |
| RSN-1201 | GSAPVYSRGTNAGPHGLTG | 8499 | RSC-1201 | GTAEAASASGVYSRGTNAG | 8744 |
| | RATSGSETPGT | | | PHGLTGRPGSP | |
| RSN-1218 | GSAPANSRGTNKGFAGLIGP | 8500 | RSC-1218 | GTAEAASASGANSRGTNKG | 8745 |
| | ATSGSETPGT | | | FAGLIGPPGSP | |
| RSN-1226 | GSAPASSRLTNEAPAGLTIPA | 8501 | RSC-1226 | GTAEAASASGASSRLTNEAP | 8746 |
| | TSGSETPGT | | | AGLTIPPGSP | |
| RSN-1254 | GSAPDQSRGTNAGPEGLTDP | 8502 | RSC-1254 | GTAEAASASGDQSRGTNAG | 8747 |
| | ATSGSETPGT | | | PEGLTDPPGSP | |
| RSN-1256 | GSAPESSRGTNIGQGGLTGP | 8503 | RSC-1256 | GTAEAASASGESSRGTNIGQ | 8748 |
| | ATSGSETPGT | | | GGLTGPPGSP | |
| RSN-1261 | GSAPSSSRGTNQDPAGLTIP | 8504 | RSC-1261 | GTAEAASASGSSSRGTNQDP | 8749 |
| | ATSGSETPGT | | | AGLTIPPGSP | |
| RSN-1293 | GSAPASSRGQNHSPMGLTGP | 8505 | RSC-1293 | GTAEAASASGASSRGQNHSP | 8750 |
| | ATSGSETPGT | | | MGLTGPPGSP | |
| RSN-1309 | GSAPAYSRGPNAGPAGLEG | 8506 | RSC-1309 | GTAEAASASGAYSRGPNAG | 8751 |
| | RATSGSETPGT | | | PAGLEGRPGSP | |
| RSN-1326 | GSAPASERGNNAGPANLTG | 8507 | RSC-1326 | GTAEAASASGASERGNNAG | 8752 |
| | FATSGSETPGT | | | PANLTGFPGSP | |
| RSN-1345 | GSAPASHRGTNPKPAILTGP | 8508 | RSC-1345 | GTAEAASASGASHRGTNPKP | 8753 |
| | ATSGSETPGT | | | AILTGPPGSP | |
| RSN-1354 | GSAPMSSRRTNANPAQLTGP | 8509 | RSC-1354 | GTAEAASASGMSSRRTNAN | 8754 |
| | ATSGSETPGT | | | PAQLTGPPGSP | |
| RSN-1426 | GSAPGAGRTDNHEPLELGA | 8510 | RSC-1426 | GTAEAASASGGAGRTDNHE | 8755 |
| | AATSGSETPGT | | | PLELGAAPGSP | |
| RSN-1478 | GSAPLAGRSENTAPLELTAG | 8511 | RSC-1478 | GTAEAASASGLAGRSENTAP | 8756 |
| | ATSGSETPGT | | | LELTAGPGSP | |
| RSN-1479 | GSAPLEGRPDNHEPLALVAS | 8512 | RSC-1479 | GTAEAASASGLEGRPDNHEP | 8757 |
| | ATSGSETPGT | | | LALVASPGSP | |
| RSN-1496 | GSAPLSGRSDNEEPLALPAG | 8513 | RSC-1496 | GTAEAASASGLSGRSDNEEP | 8758 |
| | ATSGSETPGT | | | LALPAGPGSP | |
| RSN-1508 | GSAPEAGRTDNHEPLELSAP | 8514 | RSC-1508 | GTAEAASASGEAGRTDNHE | 8759 |
| | ATSGSETPGT | | | PLELSAPPGSP | |
| RSN-1513 | GSAPEGGRSDNHGPLELVSG | 8515 | RSC-1513 | GTAEAASASGEGGRSDNHG | 8760 |
| | ATSGSETPGT | | | PLELVSGPGSP | |
| RSN-1516 | GSAPLSGRSDNEAPLELEAG | 8516 | RSC-1516 | GTAEAASASGLSGRSDNEAP | 8761 |
| | ATSGSETPGT | | | LELEAGPGSP | |
| RSN-1524 | GSAPLGGRADNHEPPELGA | 8517 | RSC-1524 | GTAEAASASGLGGRADNHE | 8762 |
| | GATSGSETPGT | | | PPELGAGPGSP | |
| RSN-1622 | GSAPPPSRGTNAEPAGLTGE | 8518 | RSC-1622 | GTAEAASASGPPSRGTNAEP | 8763 |
| | ATSGSETPGT | | | AGLTGEPGSP | |
| RSN-1629 | GSAPASTRGENAGPAGLEAP | 8519 | RSC-1629 | GTAEAASASGASTRGENAGP | 8764 |
| | ATSGSETPGT | | | AGLEAPPGSP | |
| RSN-1664 | GSAPESSRGTNGAPEGLTGP | 8520 | RSC-1664 | GTAEAASASGESSRGTNGAP | 8765 |
| | ATSGSETPGT | | | EGLTGPPGSP | |
| RSN-1667 | GSAPASSRATNESPAGLTGE | 8521 | RSC-1667 | GTAEAASASGASSRATNESP | 8766 |
| | ATSGSETPGT | | | AGLTGEPGSP | |
| RSN-1709 | GSAPASSRGENPPPGGLTGP | 8522 | RSC-1709 | GTAEAASASGASSRGENPPP | 8767 |
| | ATSGSETPGT | | | GGLTGPPGSP | |
| RSN-1712 | GSAPAASRGTNTGPAELTGS | 8523 | RSC-1712 | GTAEAASASGAASRGTNTGP | 8768 |
| | ATSGSETPGT | | | AELTGSPGSP | |
| RSN-1727 | GSAPAGSRTTNAGPGGLEGP | 8524 | RSC-1727 | GTAEAASASGAGSRTTNAGP | 8769 |
| | ATSGSETPGT | | | GGLEGPPGSP | |
| RSN-1754 | GSAPAPSRGENAGPATLTGA | 8525 | RSC-1754 | GTAEAASASGAPSRGENAGP | 8770 |
| | ATSGSETPGT | | | ATLTGAPGSP | |
| RSN-1819 | GSAPESGRAANTGPPTLTAP | 8526 | RSC-1819 | GTAEAASASGESGRAANTGP | 8771 |
| | ATSGSETPGT | | | PTLTAPPGSP | |
| RSN-1832 | GSAPNPGRAANEGPPGLPGS | 8527 | RSC-1832 | GTAEAASASGNPGRAANEG | 8772 |
| | ATSGSETPGT | | | PPGLPGSPGSP | |
| RSN-1855 | GSAPESSRAANLTPPELTGP | 8528 | RSC-1855 | GTAEAASASGESSRAANLTP | 8773 |
| | ATSGSETPGT | | | PELTGPPGSP | |
| RSN-1911 | GSAPASGRAANETPPGLTGA | 8529 | RSC-1911 | GTAEAASASGASGRAANETP | 8774 |
| | ATSGSETPGT | | | PGLTGAPGSP | |
| RSN-1929 | GSAPNSGRGENLGAPGLTGT | 8530 | RSC-1929 | GTAEAASASGNSGRGENLG | 8775 |
| | ATSGSETPGT | | | APGLTGTPGSP | |
| RSN-1951 | GSAPTTGRAANLTPAGLTGP | 8531 | RSC-1951 | GTAEAASASGTTGRAANLTP | 8776 |
| | ATSGSETPGT | | | AGLTGPPGSP | |
| RSN-2295 | GSAPEAGRSANHTPAGLTGP | 8532 | RSC-2295 | GTAEAASASGEAGRSANHTP | 8777 |
| | ATSGSETPGT | | | AGLTGPPGSP | |
| RSN-2298 | GSAPESGRAANTTPAGLTGP | 8533 | RSC-2298 | GTAEAASASGESGRAANTTP | 8778 |
| | ATSGSETPGT | | | AGLTGPPGSP | |
| RSN-2038 | GSAPTTGRATEAANLTPAGL | 8534 | RSC-2038 | GTAEAASASGTTGRATEAA | 8779 |
| | TGPATSGSETPGT | | | NLTPAGLTGPPGSP | |
| RSN-2072 | GSAPTTGRAEEAANLTPAGL | 8535 | RSC-2072 | GTAEAASASGTTGRAEEAA | 8780 |
| | TGPATSGSETPGT | | | NLTPAGLTGPPGSP | |
| RSN-2089 | GSAPTTGRAGEAANLTPAG | 8536 | RSC-2089 | GTAEAASASGTTGRAGEAA | 8781 |
| | LTGPATSGSETPGT | | | NLTPAGLTGPPGSP | |
| RSN-2302 | GSAPTTGRATEAANATPAG | 8537 | RSC-2302 | GTAEAASASGTTGRATEAA | 8782 |
| | LTGPATSGSETPGT | | | NATPAGLTGPPGSP | |
| RSN-3047 | GSAPTTGRAGEAEGATSAG | 8538 | RSC-3047 | GTAEAASASGTTGRAGEAE | 8783 |
| | ATGPATSGSETPGT | | | GATSAGATGPPGSP | |
| RSN-3052 | GSAPTTGEAGEAANATSAG | 8539 | RSC-3052 | GTAEAASASGTTGEAGEAA | 8784 |
| | ATGPATSGSETPGT | | | NATSAGATGPPGSP | |
| RSN-3043 | GSAPTTGEAGEAAGLTPAGL | 8540 | RSC-3043 | GTAEAASASGTTGEAGEAA | 8785 |
| | TGPATSGSETPGT | | | GLTPAGLTGPPGSP | |
| RSN-3041 | GSAPTTGAAGEAANATPAG | 8541 | RSC-3041 | GTAEAASASGTTGAAGEAA | 8786 |
| | LTGPATSGSETPGT | | | NATPAGLTGPPGSP | |
| RSN-3044 | GSAPTTGRAGEAAGLTPAG | 8542 | RSC-3044 | GTAEAASASGTTGRAGEAA | 8787 |
| | LTGPATSGSETPGT | | | GLTPAGLTGPPGSP | |
| RSN-3057 | GSAPTTGRAGEAANATSAG | 8543 | RSC-3057 | GTAEAASASGTTGRAGEAA | 8788 |
| | ATGPATSGSETPGT | | | NATSAGATGPPGSP | |
| RSN-3058 | GSAPTTGEAGEAAGATSAG | 8544 | RSC-3058 | GTAEAASASGTTGEAGEAA | 8789 |
| | ATGPATSGSETPGT | | | GATSAGATGPPGSP | |
| RSN-2485 | GSAPESGRAANTEPPELGAG | 8545 | RSC-2485 | GTAEAASASGESGRAANTEP | 8790 |
| | ATSGSETPGT | | | PELGAGPGSP | |
| RSN-2486 | GSAPESGRAANTAPEGLTGP | 8546 | RSC-2486 | GTAEAASASGESGRAANTAP | 8791 |
| | ATSGSETPGT | | | EGLTGPPGSP | |
| RSN-2488 | GSAPEPGRAANHEPSGLTEG | 8547 | RSC-2488 | GTAEAASASGEPGRAANHEP | 8792 |
| | ATSGSETPGT | | | SGLTEGPGSP | |
| RSN-2599 | GSAPESGRAANHTGAPPGG | 8548 | RSC-2599 | GTAEAASASGESGRAANHT | 8793 |
| | LTGPATSGSETPGT | | | GAPPGGLTGPPGSP | |
| RSN-2706 | GSAPTTGRTGEGANATPGG | 8549 | RSC-2706 | GTAEAASASGTTGRTGEGA | 8794 |
| | LTGPATSGSETPGT | | | NATPGGLTGPPGSP | |
| RSN-2707 | GSAPRTGRSGEAANETPEGL | 8550 | RSC-2707 | GTAEAASASGRTGRSGEAA | 8795 |
| | EGPATSGSETPGT | | | NETPEGLEGPPGSP | |
| RSN-2708 | GSAPRTGRTGESANETPAGL | 8551 | RSC-2708 | GTAEAASASGRTGRTGESAN | 8796 |
| | GGPATSGSETPGT | | | ETPAGLGGPPGSP | |
| RSN-2709 | GSAPSTGRTGEPANETPAGL | 8552 | RSC-2709 | GTAEAASASGSTGRTGEPAN | 8797 |
| | SGPATSGSETPGT | | | ETPAGLSGPPGSP | |
| RSN-2710 | GSAPTTGRAGEPANATPTGL | 8553 | RSC-2710 | GTAEAASASGTTGRAGEPA | 8798 |
| | SGPATSGSETPGT | | | NATPTGLSGPPGSP | |
| RSN-2711 | GSAPRTGRPGEGANATPTGL | 8554 | RSC-2711 | GTAEAASASGRTGRPGEGA | 8799 |
| | PGPATSGSETPGT | | | NATPTGLPGPPGSP | |
| RSN-2712 | GSAPRTGRGGEAANATPSG | 8555 | RSC-2712 | GTAEAASASGRTGRGGEAA | 8800 |
| | LGGPATSGSETPGT | | | NATPSGLGGPPGSP | |
| RSN-2713 | GSAPSTGRSGESANATPGGL | 8556 | RSC-2713 | GTAEAASASGSTGRSGESAN | 8801 |
| | GGPATSGSETPGT | | | ATPGGLGGPPGSP | |
| RSN-2714 | GSAPRTGRTGEEANATPAGL | 8557 | RSC-2714 | GTAEAASASGRTGRTGEEA | 8802 |
| | PGPATSGSETPGT | | | NATPAGLPGPPGSP | |
| RSN-2715 | GSAPATGRPGEPANTTPEGL | 8558 | RSC-2715 | GTAEAASASGATGRPGEPAN | 8803 |
| | EGPATSGSETPGT | | | TTPEGLEGPPGSP | |
| RSN-2716 | GSAPSTGRSGEPANATPGGL | 8559 | RSC-2716 | GTAEAASASGSTGRSGEPAN | 8804 |
| | TGPATSGSETPGT | | | ATPGGLTGPPGSP | |
| RSN-2717 | GSAPPTGRGGEGANTTPTGL | 8560 | RSC-2717 | GTAEAASASGPTGRGGEGA | 8805 |
| | PGPATSGSETPGT | | | NTTPTGLPGPPGSP | |
| RSN-2718 | GSAPPTGRSGEGANATPSGL | 8561 | RSC-2718 | GTAEAASASGPTGRSGEGAN | 8806 |
| | TGPATSGSETPGT | | | ATPSGLTGPPGSP | |
| RSN-2719 | GSAPTTGRASEGANSTPAPL | 8562 | RSC-2719 | GTAEAASASGTTGRASEGA | 8807 |
| | TEPATSGSETPGT | | | NSTPAPLTEPPGSP | |
| RSN-2720 | GSAPTYGRAAEAANTTPAG | 8563 | RSC-2720 | GTAEAASASGTYGRAAEAA | 8808 |
| | LTAPATSGSETPGT | | | NTTPAGLTAPPGSP | |
| RSN-2721 | GSAPTTGRATEGANATPAEL | 8564 | RSC-2721 | GTAEAASASGTTGRATEGA | 8809 |
| | TEPATSGSETPGT | | | NATPAELTEPPGSP | |
| RSN-2722 | GSAPTVGRASEEANTTPASL | 8565 | RSC-2722 | GTAEAASASGTVGRASEEA | 8810 |
| | TGPATSGSETPGT | | | NTTPASLTGPPGSP | |
| RSN-2723 | GSAPTTGRAPEAANATPAPL | 8566 | RSC-2723 | GTAEAASASGTTGRAPEAA | 8811 |
| | TGPATSGSETPGT | | | NATPAPLTGPPGSP | |
| RSN-2724 | GSAPTWGRATEPANATPAP | 8567 | RSC-2724 | GTAEAASASGTWGRATEPA | 8812 |
| | LTSPATSGSETPGT | | | NATPAPLTSPPGSP | |
| RSN-2725 | GSAPTVGRASESANATPAEL | 8568 | RSC-2725 | GTAEAASASGTVGRASESAN | 8813 |
| | TSPATSGSETPGT | | | ATPAELTSPPGSP | |
| RSN-2726 | GSAPTVGRAPEGANSTPAGL | 8569 | RSC-2726 | GTAEAASASGTVGRAPEGA | 8814 |
| | TGPATSGSETPGT | | | NSTPAGLTGPPGSP | |
| RSN-2727 | GSAPTWGRATEAPNLEPATL | 8570 | RSC-2727 | GTAEAASASGTWGRATEAP | 8815 |
| | TTPATSGSETPGT | | | NLEPATLTTPPGSP | |
| RSN-2728 | GSAPTTGRATEAPNLTPAPL | 8571 | RSC-2728 | GTAEAASASGTTGRATEAPN | 8816 |
| | TEPATSGSETPGT | | | LTPAPLTEPPGSP | |
| RSN-2729 | GSAPTOGRATEAPNLSPAAL | 8572 | RSC-2729 | GTAEAASASGTQGRATEAP | 8817 |
| | TSPATSGSETPGT | | | NLSPAALTSPPGSP | |
| RSN-2730 | GSAPTOGRAAEAPNLTPATL | 8573 | RSC-2730 | GTAEAASASGTQGRAAEAP | 8818 |
| | TAPATSGSETPGT | | | NLTPATLTAPPGSP | |
| RSN-2731 | GSAPTSGRAPEATNLAPAPL | 8574 | RSC-2731 | GTAEAASASGTSGRAPEATN | 8819 |
| | TGPATSGSETPGT | | | LAPAPLTGPPGSP | |
| RSN-2732 | GSAPTQGRAAEAANLTPAG | 8575 | RSC-2732 | GTAEAASASGTQGRAAEAA | 8820 |
| | LTEPATSGSETPGT | | | NLTPAGLTEPPGSP | |
| RSN-2733 | GSAPTTGRAGSAPNLPPTGL | 8576 | RSC-2733 | GTAEAASASGTTGRAGSAPN | 8821 |
| | TTPATSGSETPGT | | | LPPTGLTTPPGSP | |
| RSN-2734 | GSAPTTGRAGGAENLPPEGL | 8577 | RSC-2734 | GTAEAASASGTTGRAGGAE | 8822 |
| | TAPATSGSETPGT | | | NLPPEGLTAPPGSP | |
| RSN-2735 | GSAPTTSRAGTATNLTPEGL | 8578 | RSC-2735 | GTAEAASASGTTSRAGTATN | 8823 |
| | TAPATSGSETPGT | | | LTPEGLTAPPGSP | |
| RSN-2736 | GSAPTTGRAGTATNLPPSGL | 8579 | RSC-2736 | GTAEAASASGTTGRAGTAT | 8824 |
| | TTPATSGSETPGT | | | NLPPSGLTTPPGSP | |
| RSN-2737 | GSAPTTARAGEAENLSPSGL | 8580 | RSC-2737 | GTAEAASASGTTARAGEAE | 8825 |
| | TAPATSGSETPGT | | | NLSPSGLTAPPGSP | |
| RSN-2738 | GSAPTTGRAGGAGNLAPGG | 8581 | RSC-2738 | GTAEAASASGTTGRAGGAG | 8826 |
| | LTEPATSGSETPGT | | | NLAPGGLTEPPGSP | |
| RSN-2739 | GSAPTTGRAGTATNLPPEGL | 8582 | RSC-2739 | GTAEAASASGTTGRAGTAT | 8827 |
| | TGPATSGSETPGT | | | NLPPEGLTGPPGSP | |
| RSN-2740 | GSAPTTGRAGGAANLAPTG | 8583 | RSC-2740 | GTAEAASASGTTGRAGGAA | 8828 |
| | LTEPATSGSETPGT | | | NLAPTGLTEPPGSP | |
| RSN-2741 | GSAPTTGRAGTAENLAPSGL | 8584 | RSC-2741 | GTAEAASASGTTGRAGTAE | 8829 |
| | TTPATSGSETPGT | | | NLAPSGLTTPPGSP | |
| RSN-2742 | GSAPTTGRAGSATNLGPGGL | 8585 | RSC-2742 | GTAEAASASGTTGRAGSAT | 8830 |
| | TGPATSGSETPGT | | | NLGPGGLTGPPGSP | |
| RSN-2743 | GSAPTTARAGGAENLTPAG | 8586 | RSC-2743 | GTAEAASASGTTARAGGAE | 8831 |
| | LTEPATSGSETPGT | | | NLTPAGLTEPPGSP | |
| RSN-2744 | GSAPTTARAGSAENLSPSGL | 8587 | RSC-2744 | GTAEAASASGTTARAGSAE | 8832 |
| | TGPATSGSETPGT | | | NLSPSGLTGPPGSP | |
| RSN-2745 | GSAPTTARAGGAGNLAPEG | 8588 | RSC-2745 | GTAEAASASGTTARAGGAG | 8833 |
| | LTTPATSGSETPGT | | | NLAPEGLTTPPGSP | |
| RSN-2746 | GSAPTTSRAGAAENLTPTGL | 8589 | RSC-2746 | GTAEAASASGTTSRAGAAE | 8834 |
| | TGPATSGSETPGT | | | NLTPTGLTGPPGSP | |
| RSN-2747 | GSAPTYGRTTTPGNEPPASL | 8590 | RSC-2747 | GTAEAASASGTYGRTTTPGN | 8835 |
| | EAEATSGSETPGT | | | EPPASLEAEPGSP | |
| RSN-2748 | GSAPTYSRGESGPNEPPPGL | 8591 | RSC-2748 | GTAEAASASGTYSRGESGPN | 8836 |
| | TGPATSGSETPGT | | | EPPPGLTGPPGSP | |
| RSN-2749 | GSAPAWGRTGASENETPAP | 8592 | RSC-2749 | GTAEAASASGAWGRTGASE | 8837 |
| | LGGEATSGSETPGT | | | NETPAPLGGEPGSP | |
| RSN-2750 | GSAPRWGRAETTPNTPPEGL | 8593 | RSC-2750 | GTAEAASASGRWGRAETTP | 8838 |
| | ETEATSGSETPGT | | | NTPPEGLETEPGSP | |
| RSN-2751 | GSAPESGRAANHTGAEPPEL | 8594 | RSC-2751 | GTAEAASASGESGRAANHT | 8839 |
| | GAGATSGSETPGT | | | GAEPPELGAGPGSP | |
| RSN-2754 | GSAPTTGRAGEAANLTPAG | 8595 | RSC-2754 | GTAEAASASGTTGRAGEAA | 8840 |
| | LTESATSGSETPGT | | | NLTPAGLTESPGSP | |
| RSN-2755 | GSAPTTGRAGEAANLTPAA | 8596 | RSC-2755 | GTAEAASASGTTGRAGEAA | 8841 |
| | LTESATSGSETPGT | | | NLTPAALTESPGSP | |
| RSN-2756 | GSAPTTGRAGEAANLTPAPL | 8597 | RSC-2756 | GTAEAASASGTTGRAGEAA | 8842 |
| | TESATSGSETPGT | | | NLTPAPLTESPGSP | |
| RSN-2757 | GSAPTTGRAGEAANLTPEPL | 8598 | RSC-2757 | GTAEAASASGTTGRAGEAA | 8843 |
| | TESATSGSETPGT | | | NLTPEPLTESPGSP | |
| RSN-2758 | GSAPTTGRAGEAANLTPAG | 8599 | RSC-2758 | GTAEAASASGTTGRAGEAA | 8844 |
| | LTGAATSGSETPGT | | | NLTPAGLTGAPGSP | |
| RSN-2759 | GSAPTTGRAGEAANLTPEGL | 8600 | RSC-2759 | GTAEAASASGTTGRAGEAA | 8845 |
| | TGAATSGSETPGT | | | NLTPEGLTGAPGSP | |
| RSN-2760 | GSAPTTGRAGEAANLTPEPL | 8601 | RSC-2760 | GTAEAASASGTTGRAGEAA | 8846 |
| | TGAATSGSETPGT | | | NLTPEPLTGAPGSP | |
| RSN-2761 | GSAPTTGRAGEAANLTPAG | 8602 | RSC-2761 | GTAEAASASGTTGRAGEAA | 8847 |
| | LTEAATSGSETPGT | | | NLTPAGLTEAPGSP | |
| RSN-2762 | GSAPTTGRAGEAANLTPEGL | 8603 | RSC-2762 | GTAEAASASGTTGRAGEAA | 8848 |
| | TEAATSGSETPGT | | | NLTPEGLTEAPGSP | |
| RSN-2763 | GSAPTTGRAGEAANLTPAPL | 8604 | RSC-2763 | GTAEAASASGTTGRAGEAA | 8849 |
| | TEAATSGSETPGT | | | NLTPAPLTEAPGSP | |
| RSN-2764 | GSAPTTGRAGEAANLTPEPL | 8605 | RSC-2764 | GTAEAASASGTTGRAGEAA | 8850 |
| | TEAATSGSETPGT | | | NLTPEPLTEAPGSP | |
| RSN-2765 | GSAPTTGRAGEAANLTPEPL | 8606 | RSC-2765 | GTAEAASASGTTGRAGEAA | 8851 |
| | TGPATSGSETPGT | | | NLTPEPLTGPPGSP | |
| RSN-2766 | GSAPTTGRAGEAANLTPAG | 8607 | RSC-2766 | GTAEAASASGTTGRAGEAA | 8852 |
| | LTGGATSGSETPGT | | | NLTPAGLTGGPGSP | |
| RSN-2767 | GSAPTTGRAGEAANLTPEGL | 8608 | RSC-2767 | GTAEAASASGTTGRAGEAA | 8853 |
| | TGGATSGSETPGT | | | NLTPEGLTGGPGSP | |
| RSN-2768 | GSAPTTGRAGEAANLTPEAL | 8609 | RSC-2768 | GTAEAASASGTTGRAGEAA | 8854 |
| | TGGATSGSETPGT | | | NLTPEALTGGPGSP | |
| RSN-2769 | GSAPTTGRAGEAANLTPEPL | 8610 | RSC-2769 | GTAEAASASGTTGRAGEAA | 8855 |
| | TGGATSGSETPGT | | | NLTPEPLTGGPGSP | |
| RSN-2770 | GSAPTTGRAGEAANLTPAG | 8611 | RSC-2770 | GTAEAASASGTTGRAGEAA | 8856 |
| | LTEGATSGSETPGT | | | NLTPAGLTEGPGSP | |
| RSN-2771 | GSAPTTGRAGEAANLTPEGL | 8612 | RSC-2771 | GTAEAASASGTTGRAGEAA | 8857 |
| | TEGATSGSETPGT | | | NLTPEGLTEGPGSP | |
| RSN-2772 | GSAPTTGRAGEAANLTPAPL | 8613 | RSC-2772 | GTAEAASASGTTGRAGEAA | 8858 |
| | TEGATSGSETPGT | | | NLTPAPLTEGPGSP | |
| RSN-2773 | GSAPTTGRAGEAANLTPEPL | 8614 | RSC-2773 | GTAEAASASGTTGRAGEAA | 8859 |
| | TEGATSGSETPGT | | | NLTPEPLTEGPGSP | |
| RSN-3047 | GSAPTTGRAGEAEGATSAG | 8538 | RSC-3047 | GTAEAASASGTTGRAGEAE | 8783 |
| | ATGPATSGSETPGT | | | GATSAGATGPPGSP | |
| RSN-2783 | GSAPEAGRSAEATSAGATGP | 8615 | RSC-2783 | GTAEAASASGEAGRSAEATS | 8860 |
| | ATSGSETPGT | | | AGATGPPGSP | |
| RSN-3107 | GSAPSASGTYSRGESGPGSP | 8616 | RSC-3107 | GTAEAASASGSASGTYSRGE | 8861 |
| | ATSGSETPGT | | | SGPGSPPGSP | |
| RSN-3103 | GSAPSASGEAGRTDTHPGSP | 8617 | RSC-3103 | GTAEAASASGSASGEAGRTD | 8862 |
| | ATSGSETPGT | | | THPGSPPGSP | |
| RSN-3102 | GSAPSASGEPGRAAEHPGSP | 8618 | RSC-3102 | GTAEAASASGSASGEPGRAA | 8863 |
| | ATSGSETPGT | | | EHPGSPPGSP | |
| RSN-3119 | GSAPSPAGESSRGTTIAGSPA | 8619 | RSC-3119 | GTAEAASASGSPAGESSRGT | 8864 |
| | TSGSETPGT | | | TIAGSPPGSP | |
| RSN-3043 | GSAPTTGEAGEAAGLTPAGL | 8540 | RSC-3043 | GTAEAASASGTTGEAGEAA | 8785 |
| | TGPATSGSETPGT | | | GLTPAGLTGPPGSP | |
| RSN-2789 | GSAPEAGESAGATPAGLTGP | 8620 | RSC-2789 | GTAEAASASGEAGESAGATP | 8865 |
| | ATSGSETPGT | | | AGLTGPPGSP | |
| RSN-3109 | GSAPSASGAPLELEAGPGSP | 8621 | RSC-3109 | GTAEAASASGSASGAPLELE | 8866 |
| | ATSGSETPGT | | | AGPGSPPGSP | |
| RSN-3110 | GSAPSASGEPPELGAGPGSP | 8622 | RSC-3110 | GTAEAASASGSASGEPPELG | 8867 |
| | ATSGSETPGT | | | AGPGSPPGSP | |
| RSN-3111 | GSAPSASGEPSGLTEGPGSP | 8623 | RSC-3111 | GTAEAASASGSASGEPSGLT | 8868 |
| | ATSGSETPGT | | | EGPGSPPGSP | |
| RSN-3112 | GSAPSASGTPAPLTEPPGSPA | 8624 | RSC-3112 | GTAEAASASGSASGTPAPLT | 8869 |
| | TSGSETPGT | | | EPPGSPPGSP | |
| RSN-3113 | GSAPSASGTPAELTEPPGSPA | 8625 | RSC-3113 | GTAEAASASGSASGTPAELT | 8870 |
| | TSGSETPGT | | | EPPGSPPGSP | |
| RSN-3114 | GSAPSASGPPPGLTGPPGSPA | 8626 | RSC-3114 | GTAEAASASGSASGPPPGLT | 8871 |
| | TSGSETPGT | | | GPPGSPPGSP | |
| RSN-3115 | GSAPSASGTPAPLGGEPGSP | 8627 | RSC-3115 | GTAEAASASGSASGTPAPLG | 8872 |
| | ATSGSETPGT | | | GEPGSPPGSP | |
| RSN-3125 | GSAPSPAGAPEGLTGPAGSP | 8628 | RSC-3125 | GTAEAASASGSPAGAPEGLT | 8873 |
| | ATSGSETPGT | | | GPAGSPPGSP | |
| RSN-3126 | GSAPSPAGPPEGLETEAGSP | 8629 | RSC-3126 | GTAEAASASGSPAGPPEGLE | 8874 |
| | ATSGSETPGT | | | TEAGSPPGSP | |
| RSN-3127 | GSAPSPTSGQGGLTGPGSEP | 8630 | RSC-3127 | GTAEAASASGSPTSGQGGLT | 8875 |
| | ATSGSETPGT | | | GPGSEPPGSP | |
| RSN-3131 | GSAPSESAPPEGLETESTEPA | 8631 | RSC-3131 | GTAEAASASGSESAPPEGLE | 8876 |
| | TSGSETPGT | | | TESTEPPGSP | |
| RSN-3132 | GSAPSEGSEPLELGAASETP | 8632 | RSC-3132 | GTAEAASASGSEGSEPLELG | 8877 |
| | ATSGSETPGT | | | AASETPPGSP | |
| RSN-3133 | GSAPSEGSGPAGLEAPSETP | 8633 | RSC-3133 | GTAEAASASGSEGSGPAGLE | 8878 |
| | ATSGSETPGT | | | APSETPPGSP | |
| RSN-3138 | GSAPSEPTPPASLEAEPGSPA | 8634 | RSC-3138 | GTAEAASASGSEPTPPASLE | 8879 |
| | TSGSETPGT | | | AEPGSPPGSP | |

[0260] In another aspect, the RS for incorporation into the human or animal recombinant polypeptides can be designed to be selectively sensitive in order to have different rates of cleavage and different cleavage efficiencies to the various proteases for which they are substrates. As a given protease can be found in different concentrations in diseased tissues, including but not limited to a tumor, a blood cancer, or an inflammatory tissue or site of inflammation, compared to healthy tissues or in the circulation, the disclosure provides RS that have had the individual amino acid sequences engineered to have a higher or lower cleavage efficiency for a given protease in order to ensure that the recombinant polypeptide is preferentially converted from the prodrug form to the active form (i.e., by the separation and release of the binding moieties and XTEN from the recombinant polypeptide after cleavage of the RS) when in proximity to the target cell or tissue and its co-localized proteases compared to the rate of cleavage of the RS in healthy tissue or the circulation wherein the released antibody fragment binding moieties have a greater ability to bind to ligands in the diseased tissues compared to the prodrug form that remains in circulation. By such selective designs, the therapeutic index of the resulting compositions can be improved, resulting in reduced side effects relative to convention therapeutics that do not incorporate such site-specific activation.

[0261] As used herein cleavage efficiency is defined as the log₂ value of the ratio of the percentage of the test substrate comprising the RS cleaved to the percentage of the control substrate AC1611 cleaved when each is human or animal to the protease enzyme in biochemical assays (further detailed in the Examples) in which reaction in conducted wherein the initial substrate concentration is 6 μM, the reactions are incubated at 37° C. for 2 hours before being stopped by adding EDTA, with the amount of digestion products and uncleaved substrate analyzed by non-reducing SDS-PAGE to establish the ratio of the percentage cleaved. The cleavage efficiency is calculated as follows:

$${Log}_{2} ( \frac{\% Cleaved for substrate of interest}{\% cleaved for AC 1611 in the same experiment} ) .$$

Thus, a cleavage efficiency of −1 means that the amount of test substrate cleaved was 50% compared to that of the control substrate, while a cleavage efficiency of +1 means that the amount of test substrate cleaved was 200% compared to that of the control substrate. A higher rate of cleavage by the test protease relative to the control would result in a higher cleavage efficiency, and a slower rate of cleavage by the test protease relative to the control would result in a lower cleavage efficiency. As detailed in the Examples, a control RS sequence AC1611 (RSR-1517), having the amino acid sequence EAGRSANHEPLGLVAT (SEQ ID NO: 8261), was established as having an appropriate baseline cleavage efficiency by the proteases legumain, MMP-2, MMP-7, MMP-9, MMP-14, uPA, and matriptase, when tested in in vitro biochemical assays for rates of cleavage by the individual proteases. By selective substitution of amino acids at individual locations in the RS peptides, libraries of RS were created and evaluated against the panel of the 7 proteases (detailed more fully in the Examples), resulting in profiles that were used to establish guidelines for appropriate amino acid substitutions in order to achieve RS with desired cleavage efficiencies. In making RS with desired cleavage efficiencies, substitutions using the hydrophilic amino acids A, E, G, P, S, and T are preferred, however other L-amino acids can be substituted at given positions in order to adjust the cleavage efficiency so long as the RS retains at least some susceptibility to cleavage by a protease. Conservative substitutions of amino acids in a peptide to retain or effect activity is well within the knowledge and capabilities of a person within skill in the art. In one embodiment, the disclosure provides RS in which the RS is cleaved by a protease selected from legumain, MMP-1, MMP-2, MMP-7, MMP-9, MMP-11, MMP-14, uPA, or matriptase with at least a 0.2 log₂, or 0.4 log₂, or 0.8 log 2, or 1.0 log 2 higher cleavage efficiency in an in vitro biochemical competitive assay compared to the cleavage by the same protease of a control sequence RSR-1517 having the sequence EAGRSANHEPLGLVAT (SEQ ID NO: 8261). In another embodiment, the disclosure provides RS in which the RS is cleaved by a protease selected from legumain, MMP-1, MMP-2, MMP-7, MMP-9, MMP-11, MMP-14, uPA, or matriptase with at least a 0.2 log₂, or 0.4 log₂, or 0.8 log₂, or 1.0 log 2 lower cleavage efficiency in an in vitro biochemical competitive assay compared to the cleavage by the same protease of a control sequence RSR-1517 having the sequence EAGRSANHEPLGLVAT (SEQ ID NO: 8261). In one embodiment, the disclosure provides RS in which the rate of cleavage of the RS by a protease selected from legumain, MMP-1, MMP-2, MMP-7, MMP-9, MMP-11, MMP-14, uPA, or matriptase is at least 2-fold, or at least 4-fold, or at least 8 fold, or at least 16-fold faster compared to the control sequence RSR-1517 having the sequence EAGRSANHEPLGLVAT (SEQ ID NO: 8261). In another embodiment, the disclosure provides RS in which the rate of cleavage of the RS by a protease selected from legumain, MMP-1, MMP-2, MMP-7, MMP-9, MMP-11, MMP-14, uPA, or matriptase is at least 2-fold, or at least 4-fold, or at least 8 fold, or at least 16-fold slower compared to the control sequence RSR-1517 having the sequence EAGRSANHEPLGLVAT (SEQ ID NO: 8261).

[0262] In another aspect, the disclosure provides AAC comprising multiple RS wherein each RS sequence is selected from the group of sequences set forth in Table 8a and the RS are linked to each other by 1 to 6 amino acids selected from glycine, serine, alanine, and threonine. In one embodiment, the AAC comprises a first RS and a second RS different from the first RS wherein each RS sequence is selected from the group of sequences set forth in Table 8a and the RS are linked to each other by 1 to 6 amino acids selected from glycine, serine, alanine, and threonine. In another embodiment, the AAC comprises a first RS, a second RS different from the first RS, and a third RS different from the first and the second RS wherein each sequence is selected from the group of sequences set forth in Table 8a and the first and the second and the third RS are linked to each other by 1 to 6 amino acids selected from glycine, serine, alanine, and threonine. It is specifically intended that the multiple RS of the AAC can be concatenated to form a sequence that can be cleaved by multiple proteases at different rates or efficiency of cleavage. In another embodiment, the disclosure provides AAC comprising an RS1 and an RS2 selected from the group of sequences set forth in Tables 8a-8b and an XTEN 1 and XTEN 2, such as those described hereinabove or described elsewhere herein, wherein the RS1 is fused between the XTEN1 and the binding moieties and the RS2 is fused between the XTEN2 and the binding moieties. It is contemplated that such compositions would be more readily cleaved by diseased target tissues that express multiple proteases, compared with healthy tissues or when in the normal circulation, with the result that the resulting fragments bearing the binding moieties would more readily penetrate the target tissue; e.g., a tumor, and have an enhanced ability to bind and link the target cell and the effector cell (or just the target cell in the case of AAC designed with a single binding moiety.

[0263] The RS of the disclosure are useful for inclusion in recombinant polypeptides as therapeutics for treatment of cancers, autoimmune diseases, inflammatory diseases and other conditions where localized activation of the recombinant polypeptide is desirable. The human or animal compositions address an unmet need and are superior in one or more aspects including enhanced terminal half-life, targeted delivery, and improved therapeutic ratio with reduced toxicity to healthy tissues compared to conventional antibody therapeutics or bispecific antibody therapeutics that are active upon injection.

[0264] In some embodiments, the (fusion) polypeptide comprises a first release segment (RS1) located between the (first) XTEN and the biologically active polypeptide. In some embodiments, the polypeptide further comprises a second release segment (RS2) located between the biologically active polypeptide and the second XTEN. In some embodiments, RS1 and RS2 are identical in sequence. In some embodiments, RS1 and RS2 are not identical in sequence. In some embodiments, the RS1 comprises an amino acid sequence having at least 90%, 91%, 92%, 93%, 94%, 95%, 96%, 97%, 98%, 99% or 100% sequence identity to a sequence set forth in Tables 8a-8b. In some embodiments, the RS2 comprises an amino acid sequence having at least 90%, 91%, 92%, 93%, 94%, 95%, 96%, 97%, 98%, 99% or 100% sequence identity to a sequence set forth in Tables 8a-8b. In some embodiments, the RS1 and RS2 are each a substrate for cleavage by multiple proteases at one, two, or three cleavage sites within each release segment sequence.

### Reference Fragment

[0265] In some embodiments, the (fusion) polypeptide further comprises one or more reference fragments releasable from the polypeptide upon digestion by the protease. In some embodiments, the one or more reference fragments each comprise a portion of the biologically active polypeptide. In some embodiments, the one or more reference fragments is a single reference fragment that differs in sequence and molecular weight from all other peptide fragments that are releasable from the polypeptide upon digestion of the polypeptide by the protease.

### Polypeptide Mixture

[0266] Disclosed herein includes a mixture comprising a plurality of polypeptides of varying length; the mixture comprising a first set of polypeptides and a second set of polypeptides. In some embodiments, each polypeptide of the first set of polypeptides comprises a barcode fragment that (a) is releasable from the polypeptide by digestion with a protease and (b) has a sequence and molecular weight that differs from the sequence and molecular weight of all other fragments that are releasable from the first set of polypeptides. In some embodiments, the second set of polypeptides lack the barcode fragment of the first set of polypeptides. In some embodiments, both the first set of polypeptides and the second set of polypeptides each comprise a reference fragment that (a) is common to the first set of polypeptides and the second set of polypeptides and (b) releasable by digestion with the protease. In some embodiments, the ratio of the first set of polypeptides to polypeptides comprising the reference fragment is greater than 0.70. In some embodiments, the ratio of the first set of polypeptides to polypeptides comprising the reference fragment is greater than 0.8, 0.9, 0.95, or 0.98. In some embodiments, the reference fragment occurs no more than once in each polypeptide of the first set of polypeptides and the second set of polypeptides. In some embodiments, the protease is a protease that cleaves on the C-terminal side of glutamic acid residues. In some embodiments, the protease is a Glu-C protease. In some embodiments, the protease is not trypsin. In some embodiments, the polypeptides of varying lengths comprise polypeptides comprising at least one extended recombinant polypeptide (XTEN), such as any described hereinabove or described anywhere else herein. In some embodiments, the first set of polypeptides comprises a full-length polypeptide, wherein the barcode fragment is a portion of the full-length polypeptide. In some embodiments, the full-length polypeptide is a (fusion) polypeptide, such as any described hereinabove or described anywhere else herein. In some embodiments, the barcode fragment lacks (does not comprise) both the N-terminal amino acid and C-terminal amino acid of the full-length polypeptide. In some embodiments, the mixture of polypeptides of varying lengths differ from one another due to N-terminal truncation, C-terminal truncation, or both N- and C-terminal truncation of a full-length polypeptide. In some embodiments, the first set of polypeptides and the second set of polypeptides can differ in one or more pharmacological properties. Non-limiting exemplary properties include.

### Method of Polypeptide Characterization

[0267] Disclosed herein includes a method for assessing, in a mixture comprising polypeptides of varying length, a relative amount of a first set of polypeptides in the mixture to a second set of polypeptides in the mixture, wherein (1) each polypeptide of the first set of polypeptides shares a barcode fragment that occurs once and only once in the polypeptide and (2) each polypeptide of the second set of polypeptides lacks the barcode fragment that is shared by polypeptides of the first set, wherein individual polypeptides of both the first of polypeptides and the second set of polypeptides each comprises a reference fragment. The method can comprise contacting the mixture with a protease to produce a plurality of proteolytic fragments that result from cleavage of the first set of polypeptides and the second set of polypeptides, wherein the plurality of proteolytic fragments comprises a plurality of reference fragments, and a plurality of barcode fragments. The method can further comprise determining a ratio of the amount of barcode fragments to the amount of reference fragments, thereby assessing the relative amounts of the first set of polypeptides to the second set of polypeptides. In some embodiments, the barcode fragment occurs no more than once in each polypeptide of the first set of polypeptides. In some embodiments, the reference fragment occurs no more than once in each polypeptide of the first set of polypeptides and the second set of polypeptides. In some embodiments, the plurality of proteolytic fragments comprises a plurality of reference fragments, and a plurality of barcode fragments. In some embodiments, the protease cleaves the first and second sets of polypeptides (or the polypeptides of varying length) on the C-terminal side of glutamic acid residues that are not followed by a proline residue. In some embodiments, the protease is a Glu-C protease. In some embodiments, the protease is not trypsin. In some embodiments, the step of determining a ratio of the amount of barcode fragments to the amount of reference fragments comprises quantifying barcode fragments and reference fragments from the mixture after it has been contacted with the protease. In some embodiments, the barcode fragments and the reference fragments are identified based on their respective masses. In some embodiments, the barcode fragments and the reference fragments are identified via mass spectrometry. In some embodiments, the barcode fragments and reference fragments are identified via liquid chromatography-mass spectrometry (LC-MS). In some embodiments, the step of determining a ratio of the barcode fragments to the reference fragments comprises isobaric labeling. In some embodiments, the step of determining a ratio of the barcode fragments to the reference fragments comprises spiking the mixture with one or both of an isotope-labeled reference fragment and an isotope labeled barcode fragment. In some embodiments, the polypeptides of varying lengths comprise polypeptides that comprise at least one extended recombinant polypeptide (XTEN), as described hereinabove or described anywhere else herein. In some embodiments, the XTEN is characterized in that (i) it comprises at least 150 amino acids; (ii) at least 90% of the amino acid residues of the XTEN are selected from glycine (G), alanine (A), serine (S), threonine (T), glutamate (E) and proline (P); and (iii) it comprises at least 4 different types of amino acids selected from G, A, S, T, E, and P. In some embodiments, the barcode fragment, when present, is a portion of the XTEN. In some embodiments, the mixture of polypeptides of varying lengths comprises a polypeptide as any described hereinabove or described anywhere else herein. In some embodiments, the polypeptides of varying length comprise a full-length polypeptide and truncated fragments thereof. In some embodiments, the polypeptides of varying length consist essentially of the full-length polypeptide and truncated fragments thereof. In some embodiments, the mixture of polypeptides of varying lengths differ from one another due to N-terminal truncation, C-terminal truncation, or both N- and C-terminal truncation of a full-length polypeptide. In some embodiments, the full-length polypeptide is a polypeptide as described hereinabove or described anywhere else herein. In some embodiments, the ratio of the amount of barcode fragments to reference fragments is greater than 0.5, 0.6, 0.7, 0.8, 0.9, 0.95, 0.98, or 0.99.

### Isobaric Labeling-Based Quantification of Peptides

[0268] In some embodiments, isobaric labeling can be used for determining a ratio of the barcode fragments to the reference fragments. One of ordinary skill will understand that isobaric labeling is a mass spectrometry strategy used in quantitative proteomics, wherein peptides or proteins (or portions thereof) are labeled with various chemical groups that are isobaric (identical in mass) but vary in terms of distribution of heavy isotopes around their structure. These tags, commonly referred to as tandem mass tags, are designed so that the mass tag is cleaved at a specific linker region upon high-energy collision-induced dissociation (CID) during tandem mass spectrometry, thereby yielding reporter ions of different masses. One of ordinary skill will understand that one of the most common isobaric tags are amine-reactive tags.

[0269] The enhanced ability to detect and quantify truncation products (e.g., via isobaric labeling) can generate knowledge than can aid in designing manufacturing processes to include purification steps to minimize the presence of unwanted variants in the purified drug substance/product.

### Recombinant Production

[0270] The disclosure herein includes a nucleic acid. The nucleic acid can comprise a polynucleotide (or polynucleotide sequence) encoding a (fusion) polypeptide, such as any described hereinabove or described anywhere else herein; or the nucleic acid can comprise the reverse complement of such a polynucleotide (or polynucleotide sequence).

[0271] The disclosure herein includes an expression vector that comprises a polynucleotide sequence, such as any described in the preceding paragraph, and a regulatory sequence operably linked to the polynucleotide sequence.

[0272] The disclosure herein includes a host cell comprising an expression vector, such as described in the preceding paragraph. In some embodiments, the host cell is a prokaryote. In some embodiments, the host cell is E. coli. In some embodiments, the host cell is a mammalian cell.

[0273] In another aspect, the disclosure provides methods of manufacturing the human or animal compositions. In one embodiment, the method comprises culturing a host cell comprising a nucleic acid construct that encodes a polypeptide or an XTEN-containing composition of any of the embodiments described herein under conditions that promote the expression of the polypeptide or BPXTEN fusion polypeptide, followed by recovery of the polypeptide or BPXTEN fusion polypeptide using standard purification methods (e.g., column chromatography, HPLC, and the like) wherein the composition is recovered wherein at least 70%, or at least 80%, or at least 90%, or at least 95%, or at least 97%, or at least 99% of the binding fragments of the expressed polypeptide or BPXTEN fusion polypeptide are correctly folded. In another embodiment of the method of making, the expressed polypeptide or BPXTEN fusion polypeptide is recovered in which at least or at least 90%, or at least 95%, or at least 97%, or at least 99% of the polypeptide or BPXTEN fusion polypeptide is recovered in monomeric, soluble form.

[0274] In another aspect, the disclosure relates to methods of making the polypeptide and BPXTEN fusion polypeptide at high fermentation expression levels of functional protein using an E. coli or mammalian host cell, as well as providing expression vectors encoding the constructs useful in methods to produce the cytotoxically active polypeptide construct compositions at high expression levels. In one embodiment, the method comprises the steps of 1) preparing the polynucleotide encoding the polypeptides of any of the embodiments disclosed herein, 2) cloning the polynucleotide into an expression vector, which can be a plasmid or other vector under control of appropriate transcription and translation sequences for high level protein expression in a biological system, 3) transforming an appropriate host cell with the expression vector, and 4) culturing the host cell in conventional nutrient media under conditions suitable for the expression of the polypeptide composition. Where desired, the host cell is E. coli. By the method, the expression of the polypeptide results in fermentation titers of at least 0.05 g/L, or at least 0.1 g/L, or at least 0.2 g/L, or at least 0.3 g/L, or at least 0.5 g/L, or at least 0.6 g/L, or at least 0.7 g/L, or at least 0.8 g/L, or at least 0.9 g/L, or at least 1 g/L, or at least 2 g/L, or at least 3 g/L, or at least 4 g/L, or at least 5 g/L of the expression product of the host cell and wherein at least 70%, or at least 80%, or at least 90%, or at least 95%, or at least 97%, or at least 99% of the expressed protein are correctly folded. As used herein, the term “correctly folded” means that the antigen binding fragments component of the composition have the ability to specifically bind its target ligand. In another embodiment, the disclosure provides a method for producing a polypeptide or BPXTEN fusion polypeptide, the method comprising culturing in a fermentation reaction a host cell that comprises a vector encoding a polypeptide comprising the polypeptide or BPXTEN fusion polypeptide under conditions effective to express the polypeptide product at a concentration of more than about 10 milligrams/gram of dry weight host cell (mg/g), or at least about 250 mg/g, or about 300 mg/g, or about 350 mg/g, or about 400 mg/g, or about 450 mg/g, or about 500 mg/g of said polypeptide when the fermentation reaction reaches an optical density of at least 130 at a wavelength of 600 nm, and wherein the antigen binding fragments of the expressed protein are correctly folded. In another embodiment, the disclosure provides a method for producing a polypeptide or BPXTEN fusion polypeptide, the method comprising culturing in a fermentation reaction a host cell that comprises a vector encoding the composition under conditions effective to express the polypeptide product at a concentration of more than about 10 milligrams/gram of dry weight host cell (mg/g), or at least about 250 mg/g, or about 300 mg/g, or about 350 mg/g, or about 400 mg/g, or about 450 mg/g, or about 500 mg/g of said polypeptide when the fermentation reaction reaches an optical density of at least 130 at a wavelength of 600 nm, and wherein the expressed polypeptide product is soluble.

### Pharmaceutical Composition

[0275] Disclosed herein includes a pharmaceutical composition comprising a BPXTEN polypeptide, such as any described hereinabove or described anywhere else herein, and one or more pharmaceutically acceptable excipients. In some embodiments, the pharmaceutical composition is formulated for intradermal, subcutaneous, intravenous, intra-arterial, intraabdominal, intraperitoneal, intravitreal, intrathecal, or intramuscular administration. In some embodiments, the pharmaceutical composition is in a liquid form. In some embodiments, the pharmaceutical composition is in a device that is implanted into the eye or another body part. In some embodiments, the pharmaceutical composition is in a pre-filled syringe for a single injection. In some embodiments, the pharmaceutical composition is formulated as a lyophilized powder to be reconstituted prior to administration.

[0276] In some embodiments, the dose is administered intradermally, subcutaneously, intravenously, intravitreally (or otherwise injected into the eye), intra-arterially, intra-abdominally, intraperitoneally, intrathecally, or intramuscularly. In some embodiments, the pharmaceutical composition is administered using a device implanted into the eye or other body part. In some embodiments, the human or animal is a mouse, rat, monkey, or human.

[0277] The pharmaceutical compositions can be administered for therapy by any suitable route In addition, the pharmaceutical compositions can also contain other pharmaceutically active compounds or a plurality of compounds of the invention.

[0278] In some embodiments, the pharmaceutical composition can be administered at a therapeutically effective dose. In some cases of the foregoing, the therapeutically effective dose results in a gain in time spent within a therapeutic window for the fusion protein compared to the corresponding BP of the fusion protein not linked to the fusion protein and administered at a comparable dose to a human or animal.

[0279] In another embodiment, invention provides a method of treating a disease, disorder or condition, comprising administering the pharmaceutical composition described above to a human or animal using multiple consecutive doses of the pharmaceutical composition administered using a therapeutically effective dose regimen

[0280] BPXTEN polypeptides of the present invention can be formulated according to known methods to prepare pharmaceutically useful compositions, whereby the polypeptide is combined in admixture with a pharmaceutically acceptable carrier vehicle, such as aqueous solutions or buffers, pharmaceutically acceptable suspensions and emulsions. Therapeutic formulations are prepared for storage by mixing the active ingredient having the desired degree of purity with optional physiologically acceptable carriers, excipients or stabilizers, as described in Remington's Pharmaceutical Sciences 16th edition, Osol, A. Ed. (1980).

### Pharmaceutical Kits

[0281] In another aspect, the invention provides a kit to facilitate the use of the BPXTEN polypeptides. In one embodiment, the kit comprises, in at least a first container: (a) an amount of a BPXTEN fusion protein composition sufficient to treat a disease, condition or disorder upon administration to a human or animal in need thereof; and (b) an amount of a pharmaceutically acceptable carrier; together in a formulation ready for injection or for reconstitution with sterile water, buffer, or dextrose; together with a label identifying the BPXTEN drug and storage and handling conditions, and a sheet of the approved indications for the drug, instructions for the reconstitution and/or administration of the BPXTEN drug for the use for the prevention and/or treatment of an approved indication, appropriate dosage and safety information, and information identifying the lot and expiration of the drug. In another embodiment of the foregoing, the kit can comprise a second container that can carry a suitable diluent for the BPXTEN composition, which provides the user with the appropriate concentration of BPXTEN to be delivered to the human or animal.

### Method of Treatment

[0282] Disclosed herein includes use of a polypeptide, such as any described hereinabove or described anywhere else herein, in the preparation of a medicament for the treatment of a disease in a human or animal. In some embodiments, the particular disease to be treated depends on the choice of the biologically active proteins. In some embodiments, the disease is cancer.

[0283] Disclosed herein includes a method of treating a disease in a human or animal, the method comprising administering to the human or animal in need thereof one or more therapeutically effective doses of the pharmaceutical composition, such as any described hereinabove or described anywhere else herein. In some embodiments, the disease is cancer. In some embodiments, the pharmaceutical composition is administered to the human or animal as one or more therapeutically effective doses administered according to a dosage regimen. In some embodiments, the human or animal is a mouse, rat, monkey, or human.

[0284] The following are examples of compositions and evaluations of compositions of the disclosure. It is understood that various other embodiments can be practiced, given the general description provided above.

### EXAMPLES

### Example 1. Design of Barcoded XTEN by Minimal Mutations from General-Purpose XTEN

[0285] This example illustrates an exemplary design approach to barcoded XTEN polypeptide by making minimal mutation(s) of the amino acid sequence of a general-purpose XTEN polypeptide (such as one of Table 3b hereinabove). The relevant criteria for performing minimal mutation(s) include one or more of the following: (a) to minimize the sequence change of the corresponding XTEN polypeptide; (b) to minimize the amino acid composition change in the corresponding XTEN polypeptide; (c) to substantially maintain the net charge in the corresponding XTEN polypeptide; (d) to substantially maintain the low immunogenicity of the corresponding XTEN polypeptide; (e) to substantially maintain the pharmacokinetic properties afforded by the XTEN polypeptide.

[0286] For example, barcoded XTENs were constructed by performing one or more mutations comprising deletion of a glutamic acid residue, insertion of a glutamic acid residue, substitution of a glutamic acid residue, or substitution for a glutamic acid residue, or any combination thereof to the general-purpose XTENs in Table 9.

TABLE 9
Four general-purpose XTENs used for engineering of barcoded XTEN Polypeptides

| SEQ ID | | |
|---|---|---|
| NO. | XTEN Name | Amino Acid Sequence |
| 676 | AE144 | GSEPATSGSETPGTSESATPESGPGSEPATSGSETPGSPAGSPTSTEEGTSTEPSEG |
| | | SAPGSEPATSGSETPGSEPATSGSETPGSEPATSGSETPGTSTEPSEGSAPGTSESA |
| | | TPESGPGSEPATSGSETPGTSTEPSEGSAP |
| 686 | AE288_1 | GTSESATPESGPGSEPATSGSETPGTSESATPESGPGSEPATSGSETPGTSESATPE |
| | | SGPGTSTEPSEGSAPGSPAGSPTSTEEGTSESATPESGPGSEPATSGSETPGTSESA |
| | | TPESGPGSPAGSPTSTEEGSPAGSPTSTEEGTSTEPSEGSAPGTSESATPESGPGTS |
| | | ESATPESGPGTSESATPESGPGSEPATSGSETPGSEPATSGSETPGSPAGSPTSTEE |
| | | GTSTEPSEGSAPGTSTEPSEGSAPGSEPATSGSETPGTSESATPESGPGTSTEPSEG |
| | | SAP |
| 688 | AE576 | GSPAGSPTSTEEGTSESATPESGPGTSTEPSEGSAPGSPAGSPTSTEEGTSTEPSEG |
| | | SAPGTSTEPSEGSAPGTSESATPESGPGSEPATSGSETPGSEPATSGSETPGSPAGS |
| | | PTSTEEGTSESATPESGPGTSTEPSEGSAPGTSTEPSEGSAPGSPAGSPTSTEEGTS |
| | | TEPSEGSAPGTSTEPSEGSAPGTSESATPESGPGTSTEPSEGSAPGTSESATPESGP |
| | | GSEPATSGSETPGTSTEPSEGSAPGTSTEPSEGSAPGTSESATPESGPGTSESATPE |
| | | SGPGSPAGSPTSTEEGTSESATPESGPGSEPATSGSETPGTSESATPESGPGTSTEP |
| | | SEGSAPGTSTEPSEGSAPGTSTEPSEGSAPGTSTEPSEGSAPGTSTEPSEGSAPGTS |
| | | TEPSEGSAPGSPAGSPTSTEEGTSTEPSEGSAPGTSESATPESGPGSEPATSGSETP |
| | | GTSESATPESGPGSEPATSGSETPGTSESATPESGPGTSTEPSEGSAPGTSESATPE |
| | | SGPGSPAGSPTSTEEGSPAGSPTSTEEGSPAGSPTSTEEGTSESATPESGPGTSTEP |
| | | SEGSAP |
| 690 | AE864 | GSPAGSPTSTEEGTSESATPESGPGTSTEPSEGSAPGSPAGSPTSTEEGTSTEPSEG |
| | | SAPGTSTEPSEGSAPGTSESATPESGPGSEPATSGSETPGSEPATSGSETPGSPAGS |
| | | PTSTEEGTSESATPESGPGTSTEPSEGSAPGTSTEPSEGSAPGSPAGSPTSTEEGTS |
| | | TEPSEGSAPGTSTEPSEGSAPGTSESATPESGPGTSTEPSEGSAPGTSESATPESGP |
| | | GSEPATSGSETPGTSTEPSEGSAPGTSTEPSEGSAPGTSESATPESGPGTSESATPE |
| | | SGPGSPAGSPTSTEEGTSESATPESGPGSEPATSGSETPGTSESATPESGPGTSTEP |
| | | SEGSAPGTSTEPSEGSAPGTSTEPSEGSAPGTSTEPSEGSAPGTSTEPSEGSAPGTS |
| | | TEPSEGSAPGSPAGSPTSTEEGTSTEPSEGSAPGTSESATPESGPGSEPATSGSETP |
| | | GTSESATPESGPGSEPATSGSETPGTSESATPESGPGTSTEPSEGSAPGTSESATPE |
| | | SGPGSPAGSPTSTEEGSPAGSPTSTEEGSPAGSPTSTEEGTSESATPESGPGTSTEP |
| | | SEGSAPGTSESATPESGPGSEPATSGSETPGTSESATPESGPGSEPATSGSETPGTS |
| | | ESATPESGPGTSTEPSEGSAPGSPAGSPTSTEEGTSESATPESGPGSEPATSGSETP |
| | | GTSESATPESGPGSPAGSPTSTEEGSPAGSPTSTEEGTSTEPSEGSAPGTSESATPE |
| | | SGPGTSESATPESGPGTSESATPESGPGSEPATSGSETPGSEPATSGSETPGSPAGS |
| | | PTSTEEGTSTEPSEGSAPGTSTEPSEGSAPGSEPATSGSETPGTSESATPESGPGTS |
| | | TEPSEGSAP |

### Example 2. Sequence Analysis of Barcoded XTEN Polypeptides and Selection Thereof for Fusion to a Biologically-Active Polypeptide (“BP”)

[0287] This example illustrates the design and selection of barcoded XTEN polypeptide (and the assembly of more than one barcoded XTENs into a set) for fusion to a biologically-active polypeptide. Depending on the location of the barcode fragment(s) within the XTEN(s) and the manner in which the XTEN polypeptide(s) is/are fused to a biologically-active protein to form an XTEN polypeptide-containing construct (e.g., an XTENylated protease-activated T-cell engager (XPAT)), the barcode fragment(s) can indicate truncation(s) of the XTEN polypeptide.

[0288] In silico GluC digestion analysis was performed on two exemplary XTEN polypeptides (XTEN864 and XTEN288_1) to quantify the releasable peptide fragments upon complete GluC digestion of the XTEN polypeptide. The in silico analysis takes into consideration that, with respect to an XTEN polypeptide having consecutive glutamic acid residues (e.g., “EE”), GluC can cleave after either one of the glutamic acid residues. As shown in the results summarized below in Table 10, a 10-mer peptide sequence “TPGTSTEPSE (SEQ ID NO: 8880)” and a 14-mer peptide sequence “GSAPGSEPATSGSE (SEQ ID NO: 8881)” each occur once and only once in the longer XTEN864, while all other peptide sequences occur two or more times in XTEN864. And the 14-mer peptide sequence “GSAPGSEPATSGSE (SEQ ID NO: 8881)” also occurs once and only once in the shorter XTEN288_1.

[0289] The uniqueness of a candidate barcode is assessed in relation to all other peptide fragments releasable from the XTEN polypeptide-containing construct. Accordingly, a barcode sequence in one XTEN polypeptide cannot occur anywhere else in the XTEN polypeptide-containing construct, including any other XTEN polypeptide contained therewithin, any biologically-active protein contained therewithin, or any connection between neighboring components thereof. For example, Table 11 shows a peptide “uniqueness” table for the set of two XTEN polypeptides. Due to its presence in both XTEN864 and XTEN288, the 14-mer peptide sequence “GSAPGSEPATSGSE (SEQ ID NO: 8881” is not unique to the set of XTEN polypeptides comprising both XTEN864 and XTEN288 and, thus, cannot be used as a barcode for detecting truncations in polypeptide products that contain both of the two XTEN polypeptides.

[0290] The selection of a barcode (or a set of barcodes) can further involve identifying and determining the proper location(s) or position(s) of the candidate barcode(s) within the XTEN polypeptide. The location or position of a candidate barcode can be associated with pharmacologically relevant information of the XTEN polypeptide (and the XTEN polypeptide-containing construct as a whole), such as truncation of the XTEN polypeptide beyond a critical length and/or deletion(s) in the XTEN polypeptide. The 10mer peptide “TPGTSTEPSE (SEQ ID NO: 8880)” could serve as a suitable barcode fragment if XTEN864 is placed at the N-terminus of the XTEN polypeptide-containing product and if the truncation of 238 amino acids from the N-terminus of the product does not significantly impact the pharmacological properties of the product.

TABLE 10
Representative XTEN sequences for GluC digestion analysis

| Exemplary | | |
|---|---|---|
| XTEN | Amino acid sequence | SEQ ID NO: |
| XTEN864 | GSPAGSPTSTEEGTSESATPESGPGTSTEPSEGSAPGSPAGSPTSTEEGTSTEPSEGSAP | 8882 |
| | GTSTEPSEGSAPGTSESATPESGPGSEPATSGSETPGSEPATSGSETPGSPAGSPTSTEE | |
| | GTSESATPESGPGTSTEPSEGSAPGTSTEPSEGSAPGSPAGSPTSTEEGTSTEPSEGSAP | |
| | GTSTEPSEGSAPGTSESATPESGPGTSTEPSEGSAPGTSESATPESGPGSEPATSGSETP | |
| | GTSTEPSEGSAPGTSTEPSEGSAPGTSESATPESGPGTSESATPESGPGSPAGSPTSTEE | |
| | GTSESATPESGPGSEPATSGSETPGTSESATPESGPGTSTEPSEGSAPGTSTEPSEGSAP | |
| | GTSTEPSEGSAPGTSTEPSEGSAPGTSTEPSEGSAPGTSTEPSEGSAPGSPAGSPTSTEE | |
| | GTSTEPSEGSAPGTSESATPESGPGSEPATSGSETPGTSESATPESGPGSEPATSGSETP | |
| | GTSESATPESGPGTSTEPSEGSAPGTSESATPESGPGSPAGSPTSTEEGSPAGSPTSTEE | |
| | GSPAGSPTSTEEGTSESATPESGPGTSTEPSEGSAPGTSESATPESGPGSEPATSGSETP | |
| | GTSESATPESGPGSEPATSGSETPGTSESATPESGPGTSTEPSEGSAPGSPAGSPTSTEE | |
| | GTSESATPESGPGSEPATSGSETPGTSESATPESGPGSPAGSPTSTEEGSPAGSPTSTEE | |
| | GTSTEPSEGSAPGTSESATPESGPGTSESATPESGPGTSESATPESGPGSEPATSGSETP | |
| | GSEPATSGSETPGSPAGSPTSTEEGTSTEPSEGSAPGTSTEPSEGSAPGSEPATSGSETP | |
| | GTSESATPESGPGTSTEPSEGSAP | |
| AE288_1 | GTSESATPESGPGSEPATSGSETPGTSESATPESGPGSEPATSGSETPGTSESATPESGP | 8883 |
| | GTSTEPSEGSAPGSPAGSPTSTEEGTSESATPESGPGSEPATSGSETPGTSESATPESGP | |
| | GSPAGSPTSTEEGSPAGSPTSTEEGTSTEPSEGSAPGTSESATPESGPGTSESATPESGP | |
| | GTSESATPESGPGSEPATSGSETPGSEPATSGSETPGSPAGSPTSTEEGTSTEPSEGSAP | |
| | GTSTEPSEGSAPGSEPATSGSETPGTSESATPESGPGTSTEPSEGSAP | |

TABLE 11
Peptide “uniqueness” analysis

| Peptide fragments | SEQ ID NO: | XTEN AE288_1 | XTEN864 | Both |
|---|---|---|---|---|
| SATPE | 8884 | 9 | 23 | 32 |
| SGPGSEPATSGSE | 8885 | 4 | 9 | 13 |
| GSAPGTSTEPSE | 8886 | 1 | 10 | 11 |
| TPGTSE | 8887 | 4 | 7 | 11 |
| SGPGTSTEPSE | 8888 | 2 | 8 | 10 |
| GSAPGTSE | 8889 | 1 | 8 | 9 |
| GTSTEPSE | 8890 | 2 | 5 | 7 |
| GSAPGSPAGSPTSTEE | 8891 | 1 | 4 | 5 |
| GSPAGSPTSTEE | 186 | 1 | 4 | 5 |
| SGPGTSE | 8892 | 2 | 3 | 5 |
| SGPGSPAGSPTSTEE | 8893 | 1 | 3 | 4 |
| TPGSEPATSGSE | 8894 | 1 | 2 | 3 |
| TPGSPAGSPTSTEE | 8895 | 1 | 2 | 3 |
| GSAPGSEPATSGSE | 8881 | 1 | 1 | 2 |
| TPGTSTEPSE | 8880 | | 1 | 1 |

All underlined sequences produce unique GluC peptides
Non-XTEN core underlined and italic
Barcode peptides are bold

[0291] Exemplary barcode peptide sequences are illustrated below in Table 12. These barcode sequences should be flanked according to the structural formula (I):

[chemical structure]

wherein “AAA” represents Gly, Ala, Ser, Thr or Pro and “BBB” represent Gly, Ala, Ser, or Thr configured to facilitate efficient release of the barcode peptide by GluC digestion. Notably, the insertion of each barcode peptide in the XTEN can result in additional unique sequences directly preceding or following the inserted barcode peptides.

TABLE 12
List of suitable barcode peptides

| Candidate Barcode | SEQ | Occurrence | Occurrence | Occurrence |
|---|---|---|---|---|
| Peptide(s) | ID NO: | in XTEN864 | in XTEN288_1 | in XTEN1152 |
| SPATSGSTPE | 8020 | 0 | 0 | |
| GSAPATSE | 8021 | 0 | 0 | 0 |
| GSAPGTATE | 8022 | 0 | 0 | 0 |
| GSAPGTE | 8023 | 0 | 0 | 0 |
| PATSGPTE | 8024 | 0 | 0 | 0 |
| SASPE | 8025 | 0 | 0 | 0 |
| PATSGSTE | 8026 | 0 | 0 | 0 |
| GSAPGTSAE | 8027 | | | |
| SATSGSE | 8028 | 0 | 0 | 0 |
| SGPGSTPAE | 8029 | 0 | 0 | |
| SGSE | 8030 | 0 | | |

### Example 3: Design and Selection of XTEN(s) in Full Sequence XTENylated Polypeptide Constructs

[0292] This example illustrates the design of a full-sequence polypeptide construct, containing two XTEN polypeptides, one at the N-terminus and the other at the C-terminus.

[0293] Table 13 below illustrates XTEN polypeptides used in a representative barcoded BPXTEN (containing barcoded XTEN polypeptides at both the N- and C-termini) and a reference BPXTEN (containing general-purpose XTENs at both the N- and C-termini). In the representative barcoded BPXTEN, a barcoded XTEN polypeptide (SEQ ID No. 8014) is fused at the N-terminus of the BP, and another barcoded XTEN polypeptide (SEQ ID No. 8015) is fused at the C-terminus of the BP. In the reference BPXTEN, a “Ref-N” XTEN polypeptide (SEQ ID No. 8896) is fused at the N-terminus of the BP, and a “Ref-C” XTEN polypeptide (SEQ ID No. 8897) is fused at the C-terminus of the BP. The “Ref-N” XTEN polypeptide (SEQ ID No. 8896) is comparable in length to the barcoded XTEN polypeptide SEQ ID No. 8014; and the “Ref-C” XTEN polypeptide (SEQ ID No. 8897) is comparable in length to the barcoded XTEN polypeptide SEQ ID No. 8015. The barcoded and reference BPXTENs each contain a reference sequence in the BP component. The reference sequence is unique and differs in molecular weight from all other peptide fragments that are releasable from the corresponding BPXTEN upon complete digestion by GluC protease (e.g., according to Example 5). The uniqueness of the reference sequence is assessed in relation to all other peptide fragments releasable from the BPXTEN construct.

TABLE 13
Representative sets of N- and C-terminal XTENs used in full-length BPXTEN constructs

| SEQ ID | XTEN | | Total # |
|---|---|---|---|
| NO. | Type | Amino Acid Sequence | of AAs |
| 8014 | N-terminal | SPAGSPTSTESGTSESATPESGPGTSTEPSEGSAPGTSESATPESGPGSEPAT | 292 |
| (from | XTEN | SGSETPGTSESATPESGPGSTPAESGSETPGTSESATPESGPGTSTEPSEGS | |
| Table 3a) | | APGSPAGSPTSTEEGTSESATPESGPGSEPATSGSETPGTSESATPESGPGSP | |
| | | AGSPTSTEEGSPAGSPTSTEEGTSTEPSEGSAPGTSESATPESGPGTSESATP | |
| | | ESGPGTSESATPESGPGSEPATSGSETPGSEPATSGSETPGSPAGSPTSTEE | |
| | | GTSTEPSEGSAPGTSTEPSEGSAPGGSAP | |
| 8015 | C-terminal | PGSPAGSPTSTEEGTSESATPESGPGSEPATSGSETPGTSESATPESGPGTST | 582 |
| (from | XTEN | EPSEGSAPGTSTEPSEGSAPGTSTEPSEGSAPGTSTEPSEGSAPGTSTEPSEG | |
| Table 3a) | | SAPGTSTEPSEGSAPGSPAGSPTSTEEGTSTEPSEGSAPGTSESATPESGPGS | |
| | | EPATSGSETPGTSESATPESGPGSEPATSGSETPGTSESATPESGPGTSTEPS | |
| | | EGSAPGTSESATPESGPGSPAGSPTSTEEGSPAGSPTSTEEGSPAGSPTSTE | |
| | | EGTSESATPESGPGTSTEPSEGSAPGTSESATPESGPGSEPATSGSETPGTSE | |
| | | SATPESGPGSEPATSGSETPGTSESATPESGPGTSTEPSEGSAPGSPAGSPTS | |
| | | TEEGTSESATPESGPGSEPATSGSETPGTSESATPESGPGSPAGSPTSTEEGS | |
| | | PAGSPTSTEEGTSTEPSEGSAPGTSESATPESGPGTSESATPESGPGTSESAT | |
| | | PESGPGSEPATSGSETPGSEPATSGSETPGSPAGSPTSTEEGTSTEPSEGSAP | |
| | | GTESTPSEGSAPGSEPATSGSETPGTSESATPESGPGTSTEPSEGSAPGEPE | |
| | | A | |
| 8896 | N-terminal | SPAGSPTSTEEGTSESATPESGPGTSTEPSEGSAPGTSESATPESGPGSEPAT | 292 |
| Ref-N | XTEN | SGSETPGTSESATPESGPGSEPATSGSETPGTSESATPESGPGTSTEPSEGSA | |
| | | PGSPAGSPTSTEEGTSESATPESGPGSEPATSGSETPGTSESATPESGPGSPA | |
| | | GSPTSTEEGSPAGSPTSTEEGTSTEPSEGSAPGTSESATPESGPGTSESATPE | |
| | | SGPGTSESATPESGPGSEPATSGSETPGSEPATSGSETPGSPAGSPTSTEEG | |
| | | TSTEPSEGSAPGTSTEPSEGSAPGGSAP | |
| 8897 | C-terminal | PGSPAGSPTSTEEGTSESATPESGPGTSTEPSEGSAPGSPAGSPTSTEEGTST | 584 |
| Ref-C | XTEN | EPSEGSAPGTSTEPSEGSAPGTSESATPESGPGSEPATSGSETPGSEPATSGS | |
| | | ETPGSPAGSPTSTEEGTSESATPESGPGTSTEPSEGSAPGTSTEPSEGSAPGS | |
| | | PAGSPTSTEEGTSTEPSEGSAPGTSTEPSEGSAPGTSESATPESGPGTSTEPS | |
| | | EGSAPGTSESATPESGPGSEPATSGSETPGTSTEPSEGSAPGTSTEPSEGSA | |
| | | PGTSESATPESGPGTSESATPESGPGSPAGSPTSTEEGTSESATPESGPGSEP | |
| | | ATSGSETPGTSESATPESGPGTSTEPSEGSAPGTSTEPSEGSAPGTSTEPSEG | |
| | | SAPGTSTEPSEGSAPGTSTEPSEGSAPGTSTEPSEGSAPGSPAGSPTSTEEG | |
| | | TSTEPSEGSAPGTSESATPESGPGSEPATSGSETPGTSESATPESGPGSEPAT | |
| | | SGSETPGTSESATPESGPGTSTEPSEGSAPGTSESATPESGPGSPAGSPTSTE | |
| | | EGSPAGSPTSTEEGSPAGSPTSTEEGTSESATPESGPGTSTEPSEGSAPGAA | |
| | | EPEA | |

### Example 4: Recombinant Construction and Production of Barcoded XTENylated Fusion Polypeptides

[0294] Examples 4a-4b illustrate the recombinant construction, production, and purification of full-length polypeptides containing barcoded XTEN polypeptide(s) using the methods disclosed herein.

### Example 4a. An XTENylated Fusion Polypeptide Containing a Barcoded XTEN at the C-Terminus

[0295] EXPRESSION: Constructs encoding an XTENylated fusion polypeptide containing an anti-EpCAM single-chain variable fragment (scFv) and a 864 amino acid-long, barcoded XTEN sequence (SEQ ID NO: 8008) at the C-terminus are expressed in a proprietary E. coli AmE098 strain and partitioned into the periplasm via an N-terminal secretory leader sequence (MKKNIAFLLASMFVFSIATNAYA-)(SEQ ID NO: 8898), which is cleaved during translocation. Fermentation cultures are grown with animal-free complex medium at 37° C.; and the temperature is shifted to 26° C. prior to phosphate depletion. During harvest, fermentation whole broth is centrifuged to pellet the cells. At harvest, the total volume and the wet cell weight (WCW; ratio of pellet to supernatant) is recorded, and the pelleted cells are collected and frozen at −80° C.

[0296] RECOVERY: The frozen cell pellet is resuspended in Lysis Buffer (17.7 mM citric acid, 22.3 mM Na₂HPO₄, 75 mM NaCl, 2 mM EDTA, pH 4.0) targeting 30% wet cell weight. The resuspension is allowed to equilibrate at pH 4 then homogenized via two passes at 800±50 bar while output temperature is monitored and maintained at 15±5° C. The pH of the homogenate is confirmed to be within the specified range (pH 4.0±0.2).

[0297] CLARIFICATION: To reduce endotoxin and host cell impurities, the homogenate is allowed to undergo low-temperature (10±5° C.), acidic (pH 4.0±0.2) flocculation overnight (15-20 hours). To remove the insoluble fraction, the flocculated homogenate is centrifuged for 40 minutes at 16,900 RCF at 2-8° C., and the supernatant is retained. The supernatant is diluted approximately 3-fold with Milli-Q water (MQ), then adjusted to 7±1 mS/cm with 5 M NaCl. To remove nucleic acid, lipids, and endotoxin and to act as a filter aid, the supernatant is adjusted to 0.1% (m/m) diatomaceous earth. To keep the filter aid suspended, the supernatant is mixed via impeller and allowed to equilibrate for 30 minutes. A filter train, consisting of a depth filter followed by a 0.22 μm filter, is assembled then flushed with MQ. The supernatant is pumped through the filter train while modulating flow to maintain a pressure drop of 25±5 psig. To adjust the composite buffer system (based on the ratio of citric acid and Na₂HPO₄) to the desired range for capture chromatography, the filtrate is adjusted with 500 mM Na₂HPO₄ wherein the final ratio of Na₂HPO₄ to citric acid is 9.33:1, and the pH of the buffered filtrate is confirmed to be within the specified range (pH 7.0±0.2).

### Purification

[0298] AEX Capture: To separate dimer, aggregate, and large truncates from monomeric product, and to remove endotoxin and nucleic acids, anion exchange (AEX) chromatography is utilized to capture the electronegative C-terminal XTEN domain. The AEX1 stationary phase (GE Q Sepharose FF), AEX1 mobile phase A (12.2 mM Na₂HPO₄, 7.8 mM NaH₂PO₄, 40 mM NaCl), and AEX1 mobile phase B (12.2 mM Na₂HPO₄, 7.8 mM NaH₂PO₄, 500 mM NaCl) are used herein. The column is equilibrated with AEX1 mobile phase A. Based on the total protein concentration measured by bicinchoninic acid (BCA) assay, the filtrate is loaded onto the column targeting 28±4 g/L-resin, chased with AEX1 mobile phase A, then washed with a step to 30% B. Bound material is eluted with a gradient from 30% B to 60% B over 20 CV. Fractions are collected in 1 CV aliquots while A220≥100 mAU above (local) baseline. Elution fractions are analyzed and pooled on the basis of SDS-PAGE and SE-HPLC.

[0299] IMAC Intermediate Purification: To ensure C-terminal integrity, immobilized metal affinity chromatography (IMAC) is used to capture the C-terminal polyhistidine tag (His(6) (SEQ ID NO: 8031)). The IMAC stationary phase (GE IMAC Sepharose FF), IMAC mobile phase A (18.3 mM Na₂HPO₄, 1.7 mM NaH₂PO₄, 500 mM NaCl, 1 mM imidazole), and IMAC mobile phase B (18.3 mM Na₂HPO₄, 1.7 mM NaH₂PO₄, 500 mM NaCl, 500 mM imidazole) are used herein. The column is charged with zinc solution and equilibrated with IMAC mobile phase A. The AEX1 Pool is adjusted to pH 7.8±0.1, 50±5 mS/cm (with 5 M NaCl), and 1 mM imidazole, loaded onto the IMAC column targeting 2 g/L-resin, and chased with IMAC mobile phase A until absorbance at 280 nm (A280) returned to (local) baseline. Bound material is eluted with a step to 25% IMAC mobile phase B. The IMAC Elution collection is initiated when A280≥10 mAU above (local) baseline, directed into a container pre-spiked with EDTA sufficient to bring 2 CV to 2 mM EDTA, and terminated once 2 CV were collected. The elution is analyzed by SDS-PAGE.

[0300] Protein-L Intermediate Purification: To ensure N-terminal integrity, Protein-L is used to capture kappa domains present close to the N-terminus of the BPXTEN molecule (specifically the aEpCAM scFv). Protein-L stationary phase (GE Capto L), Protein-L mobile phase A (16.0 mM citric acid, 20.0 mM Na₂HPO₄, pH 4.0±0.1), Protein-L mobile phase B (29.0 mM citric acid, 7.0 mM Na₂HPO₄, pH 2.60±0.02), and Protein-L mobile phase C (3.5 mM citric acid, 32.5 mM Na₂HPO₄, 250 mM NaCl, pH 7.0±0.1) are used herein. The column is equilibrated with Protein-L mobile phase C. The IMAC Elution is adjusted to pH 7.0±0.1 and 30±3 mS/cm (with 5 M NaCl and MQ) and loaded onto the Protein-L column targeting 2 g/L-resin then chased with Protein-L mobile phase C until absorbance at 280 nm (A280) returns to (local) baseline. The column is washed with Protein-L mobile phase A, and Protein-L mobile phases A and B are used to effect low-pH elution. Bound material is eluted at approximately pH 3.0 and collected into a container pre-spiked with one part 0.5 M Na₂HPO₄ for every 10 parts collected volume. Fractions are analyzed by SDS-PAGE.

[0301] HIC Polishing: To separate N-terminal variants (4 residues at the absolute N-terminus are not essential for Protein-L binding) and overall conformation variants, hydrophobic interaction chromatography (HIC) is used. HIC stationary phase (GE Capto Phenyl ImpRes), HIC mobile phase A (20 mM histidine, 0.02% (w/v) polysorbate 80, pH 6.5±0.1) and HIC mobile phase B (1 M ammonium sulfate, 20 mM histidine, 0.02% (w/v) polysorbate 80, pH 6.5±0.1) are used herein. The column is equilibrated with HIC mobile phase B. The adjusted Protein-L Elution is loaded onto the HIC column targeting 2 g/L-resin and chased with HIC mobile phase B until absorbance at 280 nm (A280) returned to (local) baseline. The column is washed with 50% B. Bound material is eluted with a gradient from 50% B to 0% B over 75 CV. Fractions are collected in 1 CV aliquots while A280≥3 mAU above (local) baseline. Elution fractions are analyzed and pooled on the basis of SE-HPLC and HI-HPLC.

[0302] FORMULATION: To exchange the product into formulation buffer and to bring the product to the target concentration (0.5 g/L), anion exchange is again used to capture the C-terminal XTEN. AEX2 stationary phase (GE Q Sepharose FF), AEX2 mobile phase A (20 mM histidine, 40 mM NaCl, 0.02% (w/v) polysorbate 80, pH 6.5±0.2), AEX2 mobile phase B (20 mM histidine, 1 M NaCl, 0.02% (w/v) polysorbate 80, pH 6.5±0.2), and AEX2 mobile phase C (12.2 mM Na₂HPO₄, 7.8 mM NaH₂PO₄, 40 mM NaCl, 0.02% (w/v) polysorbate 80, pH 7.0±0.2) are used herein. The column is equilibrated with AEX2 mobile phase C. The HIC Pool is adjusted to pH 7.0±0.1 and 7±1 mS/cm (with MQ) and loaded onto the AEX2 column targeting 2 g/L-resin then chased with AEX2 mobile phase C until A280 returned to (local) baseline. The column is washed with AEX2 mobile phase A (20 mM histidine, 40 mM NaCl, 0.02% (w/v) polysorbate 80, pH 6.5±0.2). AEX2 mobile phases A and B are used to generate an {NaCl}step and effect elution. Bound material is eluted with a step to 38% AEX2 mobile phase B. The AEX2 Elution collection is initiated when A280≥5 mAU above (local) baseline and terminated once 2 column volumes were collected. The AEX2 Elution is 0.22 μm filtered within a BSC, aliquoted, labeled, and stored at −80° C. as Bulk Drug Substance (BDS). The bulk drug substance (BDS) is confirmed by various analytical methods to meet all lot release criteria. Overall quality is analyzed by SDS-PAGE, the ratio of monomer to dimer and aggregate is analyzed by SE-HPLC, and N-terminal quality and product homogeneity are analyzed by HI-HPLC.

### Example 4b. An XTENylated Fusion Polypeptide Containing a Barcoded XTEN at the C-Terminus and Another Barcoded XTEN at the N-Terminus

[0303] EXPRESSION: A construct encoding an XTENylated fusion polypeptide containing anti-EGFR single-chain variable fragment (scFv), a 864 amino acid-long barcoded XTEN (SEQ ID NO: 8008) at the C-terminus, and a 288 amino acid-long barcoded XTEN (SEQ ID NO: 8007) at the N-terminus is expressed in a proprietary E. coli AmE098 strain and partitioned into the periplasm via an N-terminal secretory leader sequence (MKKNIAFLLASMFVFSIATNAYA-)(SEQ ID NO: 8898), which is cleaved during translocation. Fermentation cultures are grown with animal-free complex medium at 37° C. and temperature shifted to 26° C. prior to phosphate depletion. During harvest, fermentation whole broth is centrifuged to pellet the cells. At harvest, the total volume and the wet cell weight (WCW; ratio of pellet to supernatant) are recorded, and the pelleted cells are collected and frozen at −80° C.

[0304] RECOVERY: The frozen cell pellet is resuspended in Lysis Buffer (100 mM citric acid) targeting 30% wet cell weight. The resuspension is allowed to equilibrate at pH 4.4 then homogenized at 17,000±200 bar while output temperature is monitored and maintained at 15±5° C. The pH of the homogenate is confirmed to be within the specified range (pH 4.4±0.1).

[0305] CLARIFICATION: To reduce endotoxin and host cell impurities, the homogenate is allowed to undergo low-temperature (10±5° C.), acidic (pH 4.4±0.1) flocculation overnight (15-20 hours). To remove the insoluble fraction, the flocculated homogenate is centrifuged for 40 minutes at 8,000 RCF and 2-8° C., and the supernatant is retained. To remove nucleic acid, lipids, and endotoxin and to act as a filter aid, the supernatant is adjusted to 0.1% (m/m) diatomaceous earth. To keep the filter aid suspended, the supernatant is mixed via impeller and allowed to equilibrate for 30 minutes. A filter train, consisting of a depth filter followed by a 0.22 μm filter, is assembled then flushed with MQ. The supernatant is pumped through the filter train while modulating flow to maintain a pressure drop of 25±5 psig.

### Purification

[0306] Protein-L Capture: To remove host cell proteins, endotoxin, and nucleic acid, Protein-L is used to capture the kappa domain present within the aEGFR scFv of the BPXTEN molecule. The Protein-L stationary phase (Tosoh TP AF-rProtein L-650F), Protein-L mobile phase A (11.5 mM citric acid, 24.5 mM Na₂HPO₄, 125 mM NaCl, 0.005% polysorbate 80, pH 5.0), and Protein-L mobile phase B (11 mM phosphoric acid, 0.005% polysorbate 80, pH 2.0) are used herein. The column is equilibrated with Protein-L mobile phase A. The filtrate is adjusted to pH 5.5±0.2 and loaded onto the Protein-L column targeting 2-4 g/L-resin then chased with Protein-L mobile phase A until absorbance at 280 nm (A280) returns to (local) baseline. Bound material is eluted with mobile phase B and collected as a 2 CV fraction pre-spiked with 0.4 CV of 0.5 M Na₂HPO₄ and is analyzed by SDS-PAGE.

[0307] IMAC Intermediate Purification: To ensure N-terminal integrity, Immobilized Metal Affinity Chromatography (IMAC) is used to capture the N-terminal polyhistidine tag (His(6); (SEQ ID NO: 8031)) of the fusion polypeptide molecule. The IMAC stationary phase (GE IMAC Sepharose FF), IMAC mobile phase A (12.2 mM Na₂HPO₄, 7.8 mM NaH₂PO₄, 500 mM NaCl, 0.005% polysorbate 80, pH 7.0), and IMAC mobile phase B (50 mM histidine, 200 mM NaCl, 0.005% polysorbate 80, pH 6.5) are used herein. The column is equilibrated with IMAC mobile phase A. The Protein-L Elution is adjusted to pH 7.8±0.1 and 50±5 mS/cm (with 5 M NaCl). The adjusted Protein-L Pool is loaded onto the IMAC column targeting 2 g/L-resin and chased with IMAC mobile phase A until absorbance at 280 nm (A280) returned to (local) baseline. Bound material is eluted with IMAC mobile phase B. The IMAC Elution is collected as a 2 CV fraction pre-spiked with 0.02 CV 200 mM EDTA and is analyzed by SDS-PAGE.

[0308] C-tag Intermediate Purification: To ensure C-terminal integrity, C-tag Affinity Chromatography is used to capture the C-terminal-EPEA tag (SEQ ID NO: 8033). The C-tag stationary phase (Thermo C-tagXL), C-tag mobile phase A (50 mM histidine, 200 mM NaCl, 0.005% polysorbate 80, pH 6.5), and C-tag mobile phase B (20 mM Tris, 0.6 M MgCl₂, 0.005% polysorbate 80, pH 7.0) are used herein. The column is equilibrated with C-tag mobile phase A. The IMAC Elution is loaded onto the C-tag column targeting 2 g/L-resin and chased with C-tag mobile phase A until absorbance at 280 nm (A280) returned to (local) baseline. Bound material is eluted with a C-tag mobile phase B. The C-tag Elution is collected as a 2 CV fraction and is analyzed by SDS-PAGE.

[0309] AEX Polishing: To separate dimer and aggregate from monomeric product Anion Exchange (AEX) chromatography is utilized to capture the electronegative N- and C-terminal XTEN domains. The AEX1 stationary phase (BIA QA-80), AEX1 mobile phase A (50 mM histidine, 200 mM NaCl, 0.005% polysorbate 80, pH 6.5), and AEX1 mobile phase B (50 mM histidine, 500 mM NaCl, 0.005% polysorbate 80, pH 6.5) are used herein. The column is equilibrated with AEX mobile phase A. The C-tag elution is diluted to 10 mS/cm with MQ, loaded targeting 2 g/L-resin, and then chased with AEX mobile phase A until absorbance at 280 nm returned to (local) baseline. Bound material is eluted with a gradient from 0% B to 100% B over 60 CV. Fractions are collected in 1 CV aliquots while A280≥2 mAU above (local) baseline. Elution fractions are analyzed by SDS-PAGE and SE-HPLC, and fractions found to be ≥98% monomer are pooled (AEX Pool) for further processing.

[0310] FORMULATION: To exchange the product into formulation buffer and to bring the product to the target concentration (0.5 g/L), Ultrafiltration/Diafiltration (UF/DF) is used. Using a 10 kDa membrane with an area of 0.1 m² and a TMP target of 15 psi, the AEX pool is concentrated to 0.5 g/L, then diluted 10-fold with Formulation Buffer (50 mM histidine, 200 mM NaCl, 0.005% polysorbate 80, pH 6.5). The AEX pool is concentrated 10-fold and diluted 10-fold two more times. The recovered Formulated product is 0.22 μm filtered within a BSC, aliquoted, labeled, and stored at −80° C. as Bulk Drug Substance (BDS). The BDS is confirmed by various analytical methods to meet all Lot Release criteria. Overall quality is analyzed by SDS-PAGE, the ratio of monomer to dimer and aggregate is analyzed by SE-HPLC, and N-terminal quality and product homogeneity is analyzed by HI-HPLC. Identity is confirmed by ESI-MS.

### Example 5. Release of Barcode Peptides by Protease Digest

[0311] This example illustrates the release of barcode fragment(s) and reference fragment(s) from a polypeptide mixture that contain varying lengths or truncated forms of the XTEN-containing construct using the methods disclosed herein.

[0312] A sample of XTEN-containing construct is reduced and alkylated via incubation in DTT and then iodoacetamide, sequentially. The samples are then buffer exchanged and desalted using a size-exclusion spin cartridge. Glu-C protease is added to the samples at an enzyme to substrate ratio of 1:5 and the samples are incubated at 37° C. for digestion. Samples are then moved to 4° C. to halt the proteolytic reaction and placed in autosampler vials for analysis.

### Example 6. Detection and Quantification of Barcode Peptide(s) and Reference Peptide(s)

[0313] This example illustrates mass spectrometry methods used to generate quantitative measurements of individual barcode peptides. An LC-Parallel Reaction Monitoring (PRM) method is programmed into a high-resolution accurate mass (HRAM) mass spectrometer. Unlike traditional Data-Dependent Acquisition (DDA) mass spectrometry methods, PRM methods focus on a specific set of 15-30 peptides in one run, sequencing each by MS-MS once per duty cycle. As such, this method generates eXtracted Ion Chromatograms (XICs) for the unfragmented precursor ions of the intact peptide, as well as for each fragment ion of the peptide to confirm its sequence. Fragment ion XICs are often more sensitive and selectively quantitative than the precursor ion fragments. The LC-PRM method used includes the light and heavy versions of seven barcode peptides. Chromatographic peak areas of all fragment ions of these 14 peptides are measured post-acquisition and the strongest fragment ion is used for quantitative measurement. Peak area ratios of the XTEN barcode peptides to the PAT barcode peptides are then calculated for relative XTEN:PAT abundance at various points across the XTEN molecules.

### Example 7. Stable Isotope Labeling to Quantify the Peptides by Mass Spectrometry (MS)

[0314] This example illustrates the stable-isotope labeling schema to enable absolute (rather than relative) quantitation of barcode peptides from XTEN-containing polypeptides. A standard Heavy labeled Amino acid quantitative schema is employed wherein synthetic analogues of barcode peptides in which the C-terminal Glutamic Acid is replaced with the (¹³C)₅H₇(¹⁵N)O₃ heavy labeled analogue are procured from a specialized vendor. A calibration curve is prepared where a known amount of XTEN barcode containing polypeptide is serially diluted into a matrix where the heavy-labeled synthetic peptide is held at a constant concentration. Accurate quantitation can be performed by calibrating chromatographic peak area heavy:light ratios from the curve against research samples containing the same spike-level of heavy labeled peptide.

### Example 8. Quantification of Truncation of XTEN-Containing Polypeptide

[0315] This example illustrates the quantification of length variants or truncation variants in a mixture of XTEN-containing polypeptides.

[0316] For example, a barcode peptide “SGPGSTPAESGSE” (SEQ ID NO: 8899) is located 76 amino acids into the representative barcoded BPXTEN sequence described in and obtained from Example 3 to indicate a severe truncation of the XTEN at the N-terminal end of the BPXTEN. Also consider a potential barcode fragment “SPAGSPTSTESGTSE” (SEQ ID NO: 8260) is located at the N-terminus. The abundance measurement ratio of each barcode peptide relative to a unique reference peptide sequence from the biologically active protein (e.g., an scFv fragment) sequence following the procedure of Example 6 indicates the total amount of the full-length polypeptides and the variants having truncations that could affect pharmacological efficacy in the sample mixture. The abundance measurement of at least one reference fragment is used to indicate the total amount of all variants of the polypeptide in the sample mixture. Accordingly, differential abundance between the reference fragment and the barcode fragments informs the amount of truncated polypeptide variants. The LC-MS data are analyzed to determine the ratio of the amount of the barcode fragment to the reference fragment, indicating the relative amount of pharmacologically-efficacious variants in the polypeptide mixture.

[0317] A set of two (or three) barcodes are used to indicate different levels of truncation of the polypeptide. The LC-MS data are used to determine the ratio of the amount of each barcode fragment to the amount of the reference fragment, thereby quantifying the distribution of truncation variants in the polypeptide mixture.

### Example 9. Quantification of Truncation of XTEN-Containing Polypeptide

[0318] A step in the purification of AC2329 is QIR Anion Exchange Chromatography. The second half of the main elution peak from this column contains the full-length protein, while the first half of the peak contains a mixture of full-length protein as well as many truncated forms. For the purposes of barcode peptide evaluation, two fractions were taken. One fraction included only the second half of the peak, heretofore referred to as the “full-length” fraction. The second fraction included the first half of the peak, heretofore referred to as the Synthetic Protein and Truncates” fraction, set forth herein:

[0319] Analytical size exclusion chromatography (SEC) overlaying the full-length (blue) fraction and the full-length+truncates fraction (Black). It is apparent that the Synthetic protein+truncates fraction includes fragments as large as intact synthetic protein, but many smaller components as well as indicated by the large sloping shoulder on the right side of the peak.

[0320] Full-length synthetic protein and full-length synthetic protein and truncates were mixed in ratios described in Dilution matrix.

Dilution matrix

| Dilution | 1 | 2 | 3 | 4 | 5 | 6 | 7 | 8 | 9 |
|---|---|---|---|---|---|---|---|---|---|
| Compound 1 (nM) | 400 | 350 | 300 | 250 | 200 | 150 | 100 | 50 | 0 |
| Compound 1 trunc (nM) | 0 | 50 | 100 | 150 | 200 | 250 | 300 | 350 | 400 |
| Total nM | 400 | 400 | 400 | 400 | 400 | 400 | 400 | 400 | 400 |
| Total vol | 60 | 60 | 60 | 60 | 60 | 60 | 60 | 60 | 60 |

[0321] Each of the 400 nM samples were then digested with 1 mg/mL GluC (Roche 10791156001) in reaction buffer containing 50 mM Tris-HCl pH 7.5+0.1% Rapigest (Waters 186001861). GluC digest was performed overnight at 37° C. in a shaking incubator. Following digestion, formic acid was added to a final concentration of 10% and incubated at 37° C. for 45 min. Rapigest precipitates were removed by centrifugation at 16,000×g for 10 min, and a heavy peptide standard mix was added to a final concentration of 400 nM. LC-MS analysis of each digest was performed as described. Each sample was measured in duplicate.

### Analysis by LC-MS

[0322] Digests were analyzed using a 30-minute gradient method on a Waters HSS-T3 column (176003994) using a Vanquish (Thermo) UHPLC system connected to a Q-Exactive Plus mass Spectrometer (Thermo). The MS method consisted of a top-ten DDA method in which the top ten peptides were sequenced by MSMS analysis after each MS scan. Resultant data files were processed using Skyline Software (MacCoss Lab, UW) software in which the heavy-peptide normalized concentrations of each barcode peptide could be calculated and measured.

[0323] Each measurement, as shown in FIG. 5B, is the XIC area of N-Barcode SGPGSTPAE (SEQ ID No. 8029) and, C-Barcode GSAPGTE (SEQ ID No. 8023) normalized to a 400 nM Spike of its corresponding heavy isotope labeled Synthetic peptide. Dilution 1 has the lowest amount of truncates and dilution 9 has the highest amount. These data indicate that the N-Barcode peptide is measured at a relatively similar abundance across truncate and non-truncate containing samples. However, a decreasing abundance of the C-Barcode peptide is seen in the truncate-containing fraction. This suggests that translation termination is the strongest contributing factor to the truncated species, as translation in prokaryotes is initiated at the N-terminus.

[0324] Having described the invention in detail and by reference to specific aspects and/or embodiments thereof, it will be apparent that modifications and variations are possible without departing from the scope of the invention defined in the appended claims. More specifically, although some aspects of the present invention can be identified herein as particularly advantageous, it is contemplated that the present invention is not limited to these particular aspects of the invention.

The application's sequence listing, which the Patent Office published only in electronic form, follows.

SEQUENCE LISTING (9399 sequences)

SEQ ID NO: 1 - protein, 52 aa, unidentified
  REGION 1..52: note = Description of Unknown: Adrenomedullin sequence
YRQSMNNFQGLRSFGCRFGTCTVQKLAHQIYQFTDKDKDNVAPRSKISPQGY

SEQ ID NO: 2 - protein, 37 aa, Rattus sp.
KCNTATCATQRLANFLVRSSNNLGPVLPPTNVGSNTY

SEQ ID NO: 3 - protein, 37 aa, Homo sapiens [sequence omitted]

SEQ ID NO: 4 - protein, 32 aa, Homo sapiens
CGNLSTCMLGTYTQDFNKFHTFPQTAIGVGAP

SEQ ID NO: 5 - protein, 32 aa, Salmo salar
CSNLSTCVLGKLSQELHKLQTYPRTNTGSGTP

SEQ ID NO: 6 - protein, 36 aa, Homo sapiens
ACDTATCVTHRLAGLLSRSGGVVKNMVPTNVGSKAF

SEQ ID NO: 7 - protein, 37 aa, Homo sapiens
ACNTATCVTHRLAGLLSRSGGMVKSNFVPTNVGSKAF

SEQ ID NO: 8 - protein, 115 aa, unidentified
  REGION 1..115: note = Description of Unknown: cholecystokinin sequence
MNSGVCLCVLMAVLAAGALTQPVPPADPAGSGLQRAEEAPRRQLRVSQRTDGESRAHLGALLARYIQQARKAPSGRMSIVKNLQNLDPSHRISDRDYMGWMDFGRRSAEEYEYPS

SEQ ID NO: 9 - protein, 33 aa, unidentified
  REGION 1..33: note = Description of Unknown: CCK-33 sequence
KAPSGRMSIVKNLQNLDPSHRISDRDYMGWMDF

SEQ ID NO: 10 - protein, 8 aa, unidentified [sequence omitted]

SEQ ID NO: 11 - protein, 39 aa, unidentified
  REGION 1..39: note = Description of Unknown: Exendin-3 sequence
HSDGTFTSDLSKQMEEEAVRLFIEWLKNGGPSSGAPPPS

SEQ ID NO: 12 - protein, 39 aa, unidentified
  REGION 1..39: note = Description of Unknown: Exendin-4 sequence
HGEGTFTSDLSKQMEEEAVRLFIEWLKNGGPSSGAPPPS

SEQ ID NO: 13 - protein, 216 aa, unidentified
  REGION 1..216: note = Description of Unknown: FGF-19 sequence
MRSGCVVVHVWILAGLWLAVAGRPLAFSDAGPHVHYGWGDPIRLRHLYTSGPHGLSSCFLRIRADGVVDCARGQSAHSLLEIKAVALRTVAIKGVHSVRYLCMGADGKMQGLLQYSEEDCAFEEEIRPDGYNVYRSEKHRLPVSLSSAKQRQLYKNRGFLPLSHFLPMLPMVPEEPEDLRGHLESDMFSSPLETDSMDPFGLVTGLEAVRSPSFEK

SEQ ID NO: 14 - protein, 209 aa, unidentified
  REGION 1..209: note = Description of Unknown: FGF-21 sequence
MDSDETGFEHSGLWVSVLAGLLLGACQAHPIPDSSPLLQFGGQVRQRYLYTDDAQQTEAHLEIREDGTVGGAADQSPESLLQLKALKPGVIQILGVKTSRFLCQRPDGALYGSLHFDPEACSFRELLLEDGYNVYQSEAHGLPLHLPGNKSPHRDPAPRGPARFLPLPGLPPALPEPPGILAPQPPDVGSSDPLSMVGPSQGRSPSYAS

SEQ ID NO: 15 - protein, 34 aa, unidentified
  REGION 1..34: note = Description of Unknown: Gastrin sequence
QLGPQGPPHLVADPSKKQGPWLEEEEEAYGWMDF

SEQ ID NO: 16 - protein, 22 aa, unidentified
  REGION 1..22: note = Description of Unknown: Gastrin-17 sequence
DPSKKQGPWLEEEEEAYGWMDF

SEQ ID NO: 17 - protein, 42 aa, unidentified
  REGION 1..42: note = Description of Unknown: Gastric inhibitory polypeptide (GIP) sequence
YAEGTFISDYSIAMDKIHQQDFVNWLLAQKGKKNDWKHNITQ

SEQ ID NO: 18 - protein, 28 aa, unidentified
  REGION 1..28: note = Description of Unknown: Ghrelin sequence
GSSFLSPEHQRVQQRKESKKPPAKLQPR

SEQ ID NO: 19 - protein, 29 aa, unidentified
  REGION 1..29: note = Description of Unknown: Glucagon sequence
HSQGTFTSDYSKYLDSRRAQDFVQWLMNT

SEQ ID NO: 20 - protein, 37 aa, Homo sapiens
HDEFERHAEGTFTSDVSSTLEGQAALEFIAWLVKGRG

SEQ ID NO: 21 - protein, 30 aa, Homo sapiens
HAEGTFTSDVSSYLEGQAALEFIAWLVKGR

SEQ ID NO: 22 - protein, 31 aa, Homo sapiens
HAEGTFTSDVSSTLEGQAALEFIAWLVKGRG

SEQ ID NO: 23 - protein, 37 aa, Xenopus sp.
HAEGTYTNDVTEYLEEKAAKEFIEWLIKGKPKKIRYS

SEQ ID NO: 24 - protein, 33 aa, Homo sapiens
HADGSFSDEMNTILDNLAARDFINWLIETKITD

SEQ ID NO: 25 - protein, 31 aa, Xenopus sp.
HAEGTFTNDMTNYLEEKAAKEFVGWLIKGRP

SEQ ID NO: 26 - protein, 70 aa, unidentified
  REGION 1..70: note = Description of Unknown: IGF-1 sequence
GPETLCGAELVDALQFVCGDRGFYFNKPTGYGSSSRRAPQTGIVDECCFRSCDLRRLEMYCAPLKPAKSA

SEQ ID NO: 27 - protein, 67 aa, unidentified
  REGION 1..67: note = Description of Unknown: IGF-2 sequence
AYRPSETLCGGELVDTLQFVCGDRGFYFSRPASRVSRRSRGIVEECCFRSCDLALLETYCATPAKSE

SEQ ID NO: 28 - protein, 149 aa, unidentified
  REGION 1..149: note = Description of Unknown: islet neogenesis-associated protein
EESQKKLPSSRITCPQGSVAYGSYCYSLILIPQTWSNAELSCQMHFSGHLAFLLSTGEITFVSSLVKNSLTAYQYIWIGLHDPSHGTLPNGSGWKWSSSNVLTFYNWERNPSIAADRGYCAVLSQKSGFQKWRDFNCENELPYICKFKV

SEQ ID NO: 29 - protein, 47 aa, unidentified
  REGION 1..47: note = Description of Unknown: Intermedin (AFP-6) sequence
TQAQLLRVGCVLGTCQVQNLSHRLWQLMGPAGRQDSAPVDPSSPHSY

SEQ ID NO: 30 - protein, 146 aa, Homo sapiens
VPIQKVQDDTKTLIKTIVTRINDISHTQSVSSKQKVTGLDFIPGLHPILTLSKMDQTLAVYQQILTSMPSRNVIQISNDLENLRDLLHVLAFSKSCHLPWASGLETLDSLGGVLEASGYSTEVVALSRLQGSLQDMLWQLDLSPGC

SEQ ID NO: 31 - protein, 8 aa, Sus scrofa
YFLFRPRN

SEQ ID NO: 32 - protein, 9 aa, unidentified
  REGION 1..9: note = Description of Unknown: Neuromedin (U-9) sequence
GYFLFRPRN

SEQ ID NO: 33 - protein, 25 aa, Homo sapiens
FRVDEEFQSPFASQSRGYFLFRPRN

SEQ ID NO: 34 - protein, 25 aa, Sus scrofa
FKVDEEFQGPIVSQNRRYFLFRPRN

SEQ ID NO: 35 - protein, 33 aa, Homo sapiens
ILQRGSGTAAVDFTKKDHTATWGRPFFLFRPRN

SEQ ID NO: 36 - protein, 23 aa, Rattus sp.
YKVNEYQGPVAPSGGFFLFRPRN

SEQ ID NO: 37 - protein, 37 aa, unidentified
  REGION 1..37: note = Description of Unknown: oxyntomodulin (OXM) sequence
HSQGTFTSDYSKYLDSRRAQDFVQWLMNTKRNRNNIA

SEQ ID NO: 38 - protein, 36 aa, unidentified
  REGION 1..36: note = Description of Unknown: Peptide YY (PYY) sequence
YPIKPEAPGEDASPEELNRYYASLRHYLNLVTRQRY

SEQ ID NO: 39 - protein, 37 aa, unidentified
  REGION 1..37: note = Description of Unknown: Pramlintide sequence
KCNTATCATNRLANFLVHSSNNFGPILPPTNVGSNTY

SEQ ID NO: 40 - protein, 40 aa, unidentified
  REGION 1..40: note = Description of Unknown: Urocortin (Ucn-1) sequence
DNPSLSIDLTFHLLRTLLELARTQSQRERAEQNRIIFDSV

SEQ ID NO: 41 - protein, 41 aa, unidentified
  REGION 1..41: note = Description of Unknown: Urocortin (Ucn-2) sequence
IVLSLDVPIGLLQILLEQARARAAREQATTNARILARVGHC

SEQ ID NO: 42 - protein, 38 aa, unidentified
  REGION 1..38: note = Description of Unknown: Urocortin (Ucn-3) sequence
FTLSLDVPTNIMNLLFNIAKAKNLRAQAAANAHLMAQI

SEQ ID NO: 43 - protein, 37 aa, synthetic construct; identical to SEQ ID NO: 39
  REGION 1..37: note = Description of Artificial Sequence: Synthetic polypeptide

SEQ ID NO: 44 - protein, 37 aa, synthetic construct
  REGION 1..37: note = Description of Artificial Sequence: Synthetic polypeptide
  MOD_RES 10: note = Asn or Gln
  MOD_RES 25: note = Ser, Pro, or Gly
  MOD_RES 28..29: note = Ser, Pro, or Gly
KCNTATCATXRLANFLVHSSNNFGXILXXTNVGSNTY

SEQ ID NO: 45 - protein, 37 aa, synthetic construct
  REGION 1..37: note = Description of Artificial Sequence: Synthetic polypeptide
KCNTATCATNRLANFLVHSSNNFGGILGGTNVGSNTY

SEQ ID NO: 46 - protein, 37 aa, synthetic construct; identical to SEQ ID NO: 45
  REGION 1..37: note = Description of Artificial Sequence: Synthetic polypeptide

SEQ ID NO: 47 - protein, 39 aa, Heloderma suspectum; identical to SEQ ID NO: 12

SEQ ID NO: 48 - protein, 37 aa, Xenopus sp.; identical to SEQ ID NO: 23

SEQ ID NO: 49 - protein, 37 aa, Xenopus laevis
HAEGTFTSDVTQQLDEKAAKEFIDWLINGGPSKEIIS

SEQ ID NO: 50 - protein, 33 aa, Xenopus laevis
HAEGTYTNDVTEYLEEKAAKEFIIEWLIKGKPK

SEQ ID NO: 51 - protein, 32 aa, Xenopus laevis
HAEGTFTNDMTNYLEEKAAKEFVGWLIKGRPK

SEQ ID NO: 52 - protein, 27 aa, Mus musculus
HAEGTFISDYSIAMDKIRQQDFVNWLL

SEQ ID NO: 53 - protein, 27 aa, Equus caballus
HAEGTFISDYSIAMDKIRQQDFVNWLL

SEQ ID NO: 54 - protein, 32 aa, Petromyzon marinus
HADGTFTNDMTSYLDAKAARDFVSWLARSDKS

SEQ ID NO: 55 - protein, 30 aa, Anguilla rostrata
HAEGTYTSDVSSYLQDQAAKEFVSWLKTGR

SEQ ID NO: 56 - protein, 30 aa, Anguilla anguilla; identical to SEQ ID NO: 55

SEQ ID NO: 57 - protein, 38 aa, Hydrolagus colliei
HADGIYTSDVASLTDYLKSKRFVESLSNYNKRQNDRRM

SEQ ID NO: 58 - protein, 31 aa, Amia calva
YADAPYISDVYSYLQDQVAKKWLKSGQDRRE

SEQ ID NO: 59 - protein, 28 aa, Ictalurus punctatus
HADGTYTSDVSSYLQEQAAKDFITWLKS

SEQ ID NO: 60 - protein, 28 aa, Anguilla sp.
HAEGTYTSDVSSYLQDQAAKEFVSWLKT

SEQ ID NO: 61 - protein, 28 aa, Bos sp.
HAEGTFTSDVSSYLEGQAAKEFIAWLVK

SEQ ID NO: 62 - protein, 28 aa, Lophius americanus
HADGTFTSDVSSYLKDQAIKDFVDRLKA

SEQ ID NO: 63 - protein, 28 aa, Hydrolagus colliei
HADGIYTSDVASLTDYLKSKRFVESLSN

SEQ ID NO: 64 - protein, 28 aa, Cavia porcellus
HSQGTFTSDYSKYLDSRRAQQFLKWLLN

SEQ ID NO: 65 - protein, 28 aa, Chinchilla sp.
HSQGTFTSDYSKHLDSRYAQEFVQWLMN

SEQ ID NO: 66 - protein, 28 aa, Lophius americanus
HSEGTFSNDYSKYLEDRKAQEFVRWLMN

SEQ ID NO: 67 - protein, 28 aa, Hydrolagus colliei
HTDGIFSSDYSKYLDNRRTKDFVQWLLS

SEQ ID NO: 68 - protein, 28 aa, Callorhinchus milii
HSEGTFSSDYSKYLDSRRAKDFVQWLMS

SEQ ID NO: 69 - protein, 28 aa, Bos taurus
YAEGTFISDYSIAMDKIRQQDFVNWLLA

SEQ ID NO: 70 - protein, 28 aa, Meleagris gallopavo
HADGIFTTVYSHLLAKLAVKRYLHSLIR

SEQ ID NO: 71 - protein, 28 aa, Gallus gallus
HIDGIFTDSYSRYRKQMAVKKYLAAVLG

SEQ ID NO: 72 - protein, 28 aa, Cavia porcellus
HSDALFTDTYTRLRKQMAMKKYLNSVLN

SEQ ID NO: 73 - protein, 28 aa, Didelphis sp.
HSDAVFTDSYTRLLKQMAMRKYLDSILN

SEQ ID NO: 74 - protein, 28 aa, Heloderma suspectum
HSDATFTAEYSKLLAKLALQKYLESILG

SEQ ID NO: 75 - protein, 28 aa, Capra hircus
YADAIFTNSYRKVLGQLSARKLLQDIMN

SEQ ID NO: 76 - protein, 28 aa, Rattus norvegicus
HADAIFTSSYRRILGQLYARKLLHEIMN

SEQ ID NO: 77 - protein, 28 aa, Mus musculus
HVDAIFTTNYRKLLSQLYARKVIQDIMN

SEQ ID NO: 78 - protein, 28 aa, Homo sapiens
VAHGILNEAYRKVLDQLSAGKHLQSLVA

SEQ ID NO: 79 - protein, 28 aa, Ovis aries
VAHGILDKAYRKVLDQLSARRYLQTLMA

SEQ ID NO: 80 - protein, 28 aa, Oncorhynchus nerka
HADGMFNKAYRKALGQLSARKYLHSLMA

SEQ ID NO: 81 - protein, 28 aa, Bos sp.
HADGSFSDEMNTVLDSLATRDFINWLLQ

SEQ ID NO: 82 - protein, 27 aa, Canis lupus
HSDGTFTSELSRLRESARLQRLLQGLV

SEQ ID NO: 83 - protein, 27 aa, Gallus gallus
HSDGLFTSEYSKMRGNAQVQKFIQNLM

SEQ ID NO: 84 - protein, 28 aa, Heloderma horridum
HSDGTFTSDLSKQMEEEAVRLFIEWLKN

SEQ ID NO: 85 - protein, 31 aa, synthetic construct
  REGION 1..31: note = Description of Artificial Sequence: Synthetic polypeptide
HAEGTFTSDVSSYLEGQAAREFIAWLVKGRG

SEQ ID NO: 86 - protein, 31 aa, synthetic construct
  REGION 1..31: note = Description of Artificial Sequence: Synthetic polypeptide
HAEGTFTSDVSSYLEGQAAKEFIAWLVRGRG

SEQ ID NO: 87 - protein, 31 aa, synthetic construct
  REGION 1..31: note = Description of Artificial Sequence: Synthetic polypeptide
HAEGTFTSDVSSYLEGQAAKEFIAWLVKGKG

SEQ ID NO: 88 - protein, 31 aa, synthetic construct
  REGION 1..31: note = Description of Artificial Sequence: Synthetic polypeptide
HAEGTFTSDVSSYLEGQAAREFIAWLVRGKG

SEQ ID NO: 89 - protein, 32 aa, synthetic construct
  REGION 1..32: note = Description of Artificial Sequence: Synthetic polypeptide
HAEGTFTSDVSSYLEGQAAREFIAWLVRGKGR

SEQ ID NO: 90 - protein, 33 aa, synthetic construct
  REGION 1..33: note = Description of Artificial Sequence: Synthetic polypeptide
HAEGTFTSDVSSYLEGQAAREFIAWLVRGRGRK

SEQ ID NO: 91 - protein, 34 aa, synthetic construct
  REGION 1..34: note = Description of Artificial Sequence: Synthetic polypeptide
HAEGTFTSDVSSYLEGQAAREFIAWLVRGRGRRK

SEQ ID NO: 92 - protein, 31 aa, synthetic construct
  REGION 1..31: note = Description of Artificial Sequence: Synthetic polypeptide
HAEGTFTSDVSSYLEGQAAREFIAWLVKGKG

SEQ ID NO: 93 - protein, 31 aa, synthetic construct
  REGION 1..31: note = Description of Artificial Sequence: Synthetic polypeptide
HAEGTFTSDVSSYLEGQAAKEFIAWLVRGKG

SEQ ID NO: 94 - protein, 33 aa, synthetic construct
  REGION 1..33: note = Description of Artificial Sequence: Synthetic polypeptide
HAEGTFTSDVSSYLEGQAAREFIAWLVKGRGRK

SEQ ID NO: 95 - protein, 34 aa, synthetic construct
  REGION 1..34: note = Description of Artificial Sequence: Synthetic polypeptide
HAEGTFTSDVSSYLEGQAAKEFIAWLVRGRGRRK

SEQ ID NO: 96 - protein, 33 aa, synthetic construct
  REGION 1..33: note = Description of Artificial Sequence: Synthetic polypeptide
HAEGTFTSDVSSYLEGQAAREFIAWLVRGKGRK

SEQ ID NO: 97 - protein, 34 aa, synthetic construct
  REGION 1..34: note = Description of Artificial Sequence: Synthetic polypeptide
HAEGTFTSDVSSYLEGQAAREFIAWLVRGKGRRK

SEQ ID NO: 98 - protein, 31 aa, synthetic construct
  REGION 1..31: note = Description of Artificial Sequence: Synthetic polypeptide
HGEGTFTSDVSSYLEGQAAREFIAWLVKGRG

SEQ ID NO: 99 - protein, 31 aa, synthetic construct
  REGION 1..31: note = Description of Artificial Sequence: Synthetic polypeptide
HGEGTFTSDVSSYLEGQAAKEFIAWLVRGRG

SEQ ID NO: 100 - protein, 31 aa, synthetic construct
  REGION 1..31: note = Description of Artificial Sequence: Synthetic polypeptide
HGEGTFTSDVSSYLEGQAAKEFIAWLVKGKG

SEQ ID NO: 101 - protein, 31 aa, synthetic construct
  REGION 1..31: note = Description of Artificial Sequence: Synthetic polypeptide
HGEGTFTSDVSSYLEGQAAREFIAWLVRGKG

SEQ ID NO: 102 - protein, 33 aa, synthetic construct
  REGION 1..33: note = Description of Artificial Sequence: Synthetic polypeptide
HGEGTFTSDVSSYLEGQAAREFIAWLVRGRGRK

SEQ ID NO: 103 - protein, 34 aa, synthetic construct
  REGION 1..34: note = Description of Artificial Sequence: Synthetic polypeptide
HGEGTFTSDVSSYLEGQAAREFIAWLVRGRGRRK

SEQ ID NO: 104 - protein, 31 aa, synthetic construct
  REGION 1..31: note = Description of Artificial Sequence: Synthetic polypeptide
HGEGTFTSDVSSYLEGQAAREFIAWLVKGKG

SEQ ID NO: 105 - protein, 31 aa, synthetic construct
  REGION 1..31: note = Description of Artificial Sequence: Synthetic polypeptide
HGEGTFTSDVSSYLEGQAAKEFIAWLVRGKG

SEQ ID NO: 106 - protein, 33 aa, synthetic construct
  REGION 1..33: note = Description of Artificial Sequence: Synthetic polypeptide
HGEGTFTSDVSSYLEGQAAREFIAWLVKGRGRK

SEQ ID NO: 107 - protein, 34 aa, synthetic construct
  REGION 1..34: note = Description of Artificial Sequence: Synthetic polypeptide
HGEGTFTSDVSSYLEGQAAKEFIAWLVRGRGRRK

SEQ ID NO: 108 - protein, 33 aa, synthetic construct
  REGION 1..33: note = Description of Artificial Sequence: Synthetic polypeptide
HGEGTFTSDVSSYLEGQAAREFIAWLVRGKGRK

SEQ ID NO: 109 - protein, 34 aa, synthetic construct
  REGION 1..34: note = Description of Artificial Sequence: Synthetic polypeptide
HGEGTFTSDVSSYLEGQAAREFIAWLVRGKGRRK

SEQ ID NO: 110 - protein, 32 aa, synthetic construct
  REGION 1..32: note = Description of Artificial Sequence: Synthetic polypeptide
HAEGTFTSDVSSYLEGQAAREFIAWLVRGRGK

SEQ ID NO: 111 - protein, 33 aa, synthetic construct; identical to SEQ ID NO: 90
  REGION 1..33: note = Description of Artificial Sequence: Synthetic polypeptide

SEQ ID NO: 112 - protein, 34 aa, synthetic construct; identical to SEQ ID NO: 91
  REGION 1..34: note = Description of Artificial Sequence: Synthetic polypeptide

SEQ ID NO: 113 - protein, 35 aa, synthetic construct
  REGION 1..35: note = Description of Artificial Sequence: Synthetic polypeptide
HAEGTFTSDVSSYLEGQAAREFIAWLVRGRGRREK

SEQ ID NO: 114 - protein, 36 aa, synthetic construct
  REGION 1..36: note = Description of Artificial Sequence: Synthetic polypeptide
HAEGTFTSDVSSYLEGQAAREFIAWLVRGRGRREFK

SEQ ID NO: 115 - protein, 37 aa, synthetic construct
  REGION 1..37: note = Description of Artificial Sequence: Synthetic polypeptide
HAEGTFTSDVSSYLEGQAAREFIAWLVRGRGRREFPK

SEQ ID NO: 116 - protein, 38 aa, synthetic construct
  REGION 1..38: note = Description of Artificial Sequence: Synthetic polypeptide
HAEGTFTSDVSSYLEGQAAREFIAWLVRGRGRREFPEK

SEQ ID NO: 117 - protein, 39 aa, synthetic construct
  REGION 1..39: note = Description of Artificial Sequence: Synthetic polypeptide
HAEGTFTSDVSSYLEGQAAREFIAWLVRGRGRREFPEEK

SEQ ID NO: 118 - protein, 38 aa, synthetic construct
  REGION 1..38: note = Description of Artificial Sequence: Synthetic polypeptide
HDEFERHAEGTFTSDVSSYLEGQAAREFIAWLVRGRGK

SEQ ID NO: 119 - protein, 39 aa, synthetic construct
  REGION 1..39: note = Description of Artificial Sequence: Synthetic polypeptide
HDEFERHAEGTFTSDVSSYLEGQAAREFIAWLVRGRGRK

SEQ ID NO: 120 - protein, 40 aa, synthetic construct
  REGION 1..40: note = Description of Artificial Sequence: Synthetic polypeptide
HDEFERHAEGTFTSDVSSYLEGQAAREFIAWLVRGRGRRK

SEQ ID NO: 121 - protein, 41 aa, synthetic construct
  REGION 1..41: note = Description of Artificial Sequence: Synthetic polypeptide
HDEFERHAEGTFTSDVSSYLEGQAAREFIAWLVRGRGRREK

SEQ ID NO: 122 - protein, 42 aa, synthetic construct
  REGION 1..42: note = Description of Artificial Sequence: Synthetic polypeptide
HDEFERHAEGTFTSDVSSYLEGQAAREFIAWLVRGRGRREFK

SEQ ID NO: 123 - protein, 43 aa, synthetic construct
  REGION 1..43: note = Description of Artificial Sequence: Synthetic polypeptide
HDEFERHAEGTFTSDVSSYLEGQAAREFIAWLVRGRGRREFPK

SEQ ID NO: 124 - protein, 44 aa, synthetic construct
  REGION 1..44: note = Description of Artificial Sequence: Synthetic polypeptide
HDEFERHAEGTFTSDVSSYLEGQAAREFIAWLVRGRGRREFPEK

SEQ ID NO: 125 - protein, 45 aa, synthetic construct
  REGION 1..45: note = Description of Artificial Sequence: Synthetic polypeptide
HDEFERHAEGTFTSDVSSYLEGQAAREFIAWLVRGRGRREFPEEK

SEQ ID NO: 126 - protein, 38 aa, synthetic construct
  REGION 1..38: note = Description of Artificial Sequence: Synthetic polypeptide
DEFERHAEGTFTSDVSSYLEGQAAREFIAWLVRGRGRK

SEQ ID NO: 127 - protein, 39 aa, synthetic construct
  REGION 1..39: note = Description of Artificial Sequence: Synthetic polypeptide
DEFERHAEGTFTSDVSSYLEGQAAREFIAWLVRGRGRRK

SEQ ID NO: 128 - protein, 40 aa, synthetic construct
  REGION 1..40: note = Description of Artificial Sequence: Synthetic polypeptide
DEFERHAEGTFTSDVSSYLEGQAAREFIAWLVRGRGRREK

SEQ ID NO: 129 - protein, 41 aa, synthetic construct
  REGION 1..41: note = Description of Artificial Sequence: Synthetic polypeptide
DEFERHAEGTFTSDVSSYLEGQAAREFIAWLVRGRGRREFK

SEQ ID NO: 130 - protein, 42 aa, synthetic construct
  REGION 1..42: note = Description of Artificial Sequence: Synthetic polypeptide
DEFERHAEGTFTSDVSSYLEGQAAREFIAWLVRGRGRREFPK

SEQ ID NO: 131 - protein, 43 aa, synthetic construct
  REGION 1..43: note = Description of Artificial Sequence: Synthetic polypeptide
DEFERHAEGTFTSDVSSYLEGQAAREFIAWLVRGRGRREFPEK

SEQ ID NO: 132 - protein, 44 aa, synthetic construct
  REGION 1..44: note = Description of Artificial Sequence: Synthetic polypeptide
DEFERHAEGTFTSDVSSYLEGQAAREFIAWLVRGRGRREFPEEK

SEQ ID NO: 133 - protein, 36 aa, synthetic construct
  REGION 1..36: note = Description of Artificial Sequence: Synthetic polypeptide
EFERHAEGTFTSDVSSYLEGQAAREFIAWLVRGRGK

SEQ ID NO: 134 - protein, 37 aa, synthetic construct
  REGION 1..37: note = Description of Artificial Sequence: Synthetic polypeptide
EFERHAEGTFTSDVSSYLEGQAAREFIAWLVRGRGRK

SEQ ID NO: 135 - protein, 38 aa, synthetic construct
  REGION 1..38: note = Description of Artificial Sequence: Synthetic polypeptide
EFERHAEGTFTSDVSSYLEGQAAREFIAWLVRGRGRRK

SEQ ID NO: 136 - protein, 39 aa, synthetic construct
  REGION 1..39: note = Description of Artificial Sequence: Synthetic polypeptide
EFERHAEGTFTSDVSSYLEGQAAREFIAWLVRGRGRREK

SEQ ID NO: 137 - protein, 40 aa, synthetic construct
  REGION 1..40: note = Description of Artificial Sequence: Synthetic polypeptide
EFERHAEGTFTSDVSSYLEGQAAREFIAWLVRGRGRREFK

SEQ ID NO: 138 - protein, 41 aa, synthetic construct
  REGION 1..41: note = Description of Artificial Sequence: Synthetic polypeptide
EFERHAEGTFTSDVSSYLEGQAAREFIAWLVRGRGRREFPK

SEQ ID NO: 139 - protein, 42 aa, synthetic construct
  REGION 1..42: note = Description of Artificial Sequence: Synthetic polypeptide
EFERHAEGTFTSDVSSYLEGQAAREFIAWLVRGRGRREFPEK

SEQ ID NO: 140 - protein, 43 aa, synthetic construct
  REGION 1..43: note = Description of Artificial Sequence: Synthetic polypeptide
EFERHAEGTFTSDVSSYLEGQAAREFIAWLVRGRGRREFPEEK

SEQ ID NO: 141 - protein, 35 aa, synthetic construct
  REGION 1..35: note = Description of Artificial Sequence: Synthetic polypeptide
FERHAEGTFTSDVSSYLEGQAAREFIAWLVRGRGK

SEQ ID NO: 142 - protein, 36 aa, synthetic construct
  REGION 1..36: note = Description of Artificial Sequence: Synthetic polypeptide
FERHAEGTFTSDVSSYLEGQAAREFIAWLVRGRGRK

SEQ ID NO: 143 - protein, 37 aa, synthetic construct
  REGION 1..37: note = Description of Artificial Sequence: Synthetic polypeptide
FERHAEGTFTSDVSSYLEGQAAREFIAWLVRGRGRRK

SEQ ID NO: 144 - protein, 38 aa, synthetic construct
  REGION 1..38: note = Description of Artificial Sequence: Synthetic polypeptide
FERHAEGTFTSDVSSYLEGQAAREFIAWLVRGRGRREK

SEQ ID NO: 145 - protein, 39 aa, synthetic construct
  REGION 1..39: note = Description of Artificial Sequence: Synthetic polypeptide
FERHAEGTFTSDVSSYLEGQAAREFIAWLVRGRGRREFK

SEQ ID NO: 146 - protein, 40 aa, synthetic construct
  REGION 1..40: note = Description of Artificial Sequence: Synthetic polypeptide
FERHAEGTFTSDVSSYLEGQAAREFIAWLVRGRGRREFPK

SEQ ID NO: 147 - protein, 41 aa, synthetic construct
  REGION 1..41: note = Description of Artificial Sequence: Synthetic polypeptide
FERHAEGTFTSDVSSYLEGQAAREFIAWLVRGRGRREFPEK

SEQ ID NO: 148 - protein, 42 aa, synthetic construct
  REGION 1..42: note = Description of Artificial Sequence: Synthetic polypeptide
FERHAEGTFTSDVSSYLEGQAAREFIAWLVRGRGRREFPEEK

SEQ ID NO: 149 - protein, 34 aa, synthetic construct
  REGION 1..34: note = Description of Artificial Sequence: Synthetic polypeptide
ERHAEGTFTSDVSSYLEGQAAREFIAWLVRGRGK

SEQ ID NO: 150 - protein, 35 aa, synthetic construct
  REGION 1..35: note = Description of Artificial Sequence: Synthetic polypeptide
ERHAEGTFTSDVSSYLEGQAAREFIAWLVRGRGRK

SEQ ID NO: 151 - protein, 36 aa, synthetic construct
  REGION 1..36: note = Description of Artificial Sequence: Synthetic polypeptide
ERHAEGTFTSDVSSYLEGQAAREFIAWLVRGRGRRK

SEQ ID NO: 152 - protein, 37 aa, synthetic construct
  REGION 1..37: note = Description of Artificial Sequence: Synthetic polypeptide
ERHAEGTFTSDVSSYLEGQAAREFIAWLVRGRGRREK

SEQ ID NO: 153 - protein, 38 aa, synthetic construct
  REGION 1..38: note = Description of Artificial Sequence: Synthetic polypeptide
ERHAEGTFTSDVSSYLEGQAAREFIAWLVRGRGRREFK

SEQ ID NO: 154 - protein, 39 aa, synthetic construct
  REGION 1..39: note = Description of Artificial Sequence: Synthetic polypeptide
ERHAEGTFTSDVSSYLEGQAAREFIAWLVRGRGRREFPK

SEQ ID NO: 155 - protein, 40 aa, synthetic construct
  REGION 1..40: note = Description of Artificial Sequence: Synthetic polypeptide
ERHAEGTFTSDVSSYLEGQAAREFIAWLVRGRGRREFPEK

SEQ ID NO: 156 - protein, 41 aa, synthetic construct
  REGION 1..41: note = Description of Artificial Sequence: Synthetic polypeptide
ERHAEGTFTSDVSSYLEGQAAREFIAWLVRGRGRREFPEEK

SEQ ID NO: 157 - protein, 33 aa, synthetic construct
  REGION 1..33: note = Description of Artificial Sequence: Synthetic polypeptide
RHAEGTFTSDVSSYLEGQAAREFIAWLVRGRGK

SEQ ID NO: 158 - protein, 34 aa, synthetic construct
  REGION 1..34: note = Description of Artificial Sequence: Synthetic polypeptide
RHAEGTFTSDVSSYLEGQAAREFIAWLVRGRGRK

SEQ ID NO: 159 - protein, 35 aa, synthetic construct
  REGION 1..35: note = Description of Artificial Sequence: Synthetic polypeptide
RHAEGTFTSDVSSYLEGQAAREFIAWLVRGRGRRK

SEQ ID NO: 160 - protein, 36 aa, synthetic construct
  REGION 1..36: note = Description of Artificial Sequence: Synthetic polypeptide
RHAEGTFTSDVSSYLEGQAAREFIAWLVRGRGRREK

SEQ ID NO: 161 - protein, 37 aa, synthetic construct
  REGION 1..37: note = Description of Artificial Sequence: Synthetic polypeptide
RHAEGTFTSDVSSYLEGQAAREFIAWLVRGRGRREFK

SEQ ID NO: 162 - protein, 38 aa, synthetic construct
  REGION 1..38: note = Description of Artificial Sequence: Synthetic polypeptide
RHAEGTFTSDVSSYLEGQAAREFIAWLVRGRGRREFPK

SEQ ID NO: 163 - protein, 39 aa, synthetic construct
  REGION 1..39: note = Description of Artificial Sequence: Synthetic polypeptide
RHAEGTFTSDVSSYLEGQAAREFIAWLVRGRGRREFPEK

SEQ ID NO: 164 - protein, 40 aa, synthetic construct
  REGION 1..40: note = Description of Artificial Sequence: Synthetic polypeptide
RHAEGTFTSDVSSYLEGQAAREFIAWLVRGRGRREFPEEK

SEQ ID NO: 165 - protein, 38 aa, synthetic construct
  REGION 1..38: note = Description of Artificial Sequence: Synthetic polypeptide
HDEFERHAEGTFTSDVSSYLEGQAAREFIAWLVKGRGK

SEQ ID NO: 166 - protein, 38 aa, synthetic construct
  REGION 1..38: note = Description of Artificial Sequence: Synthetic polypeptide
HDEFERHAEGTFTSDVSSYLEGQAAKEFIAWLVRGRGK

SEQ ID NO: 167 - protein, 38 aa, synthetic construct
  REGION 1..38: note = Description of Artificial Sequence: Synthetic polypeptide
HDEFERHAEGTFTSDVSSYLEGQAAREFIAWLVRGKGK

SEQ ID NO: 168 - protein, 32 aa, synthetic construct
  REGION 1..32: note = Description of Artificial Sequence: Synthetic polypeptide
HAEGTFTSDVSSYLEGQAAREFIAWLVKGRGK

SEQ ID NO: 169 - protein, 32 aa, synthetic construct
  REGION 1..32: note = Description of Artificial Sequence: Synthetic polypeptide
HAEGTFTSDVSSYLEGQAAKEFIAWLVRGRGK

SEQ ID NO: 170 - protein, 32 aa, synthetic construct
  REGION 1..32: note = Description of Artificial Sequence: Synthetic polypeptide
HAEGTFTSDVSSYLEGQAAREFIAWLVRGKGK

SEQ ID NO: 171 - protein, 32 aa, synthetic construct; identical to SEQ ID NO: 110
  REGION 1..32: note = Description of Artificial Sequence: Synthetic polypeptide

SEQ ID NO: 172 - protein, 39 aa, synthetic construct
  REGION 1..39: note = Description of Artificial Sequence: Synthetic polypeptide
HDEFERHAEGTFTSDVSSYLEGQAAREFIAWLVKGRGRK

SEQ ID NO: 173 - protein, 39 aa, synthetic construct
  REGION 1..39: note = Description of Artificial Sequence: Synthetic polypeptide
HDEFERHAEGTFTSDVSSYLEGQAAKEFIAWLVRGRGRK

SEQ ID NO: 174 - protein, 39 aa, synthetic construct
  REGION 1..39: note = Description of Artificial Sequence: Synthetic polypeptide
HDEFERHAEGTFTSDVSSYLEGQAAREFIAWLVRGKGRK

SEQ ID NO: 175 - protein, 33 aa, synthetic construct; identical to SEQ ID NO: 94
  REGION 1..33: note = Description of Artificial Sequence: Synthetic polypeptide

SEQ ID NO: 176 - protein, 33 aa, synthetic construct
  REGION 1..33: note = Description of Artificial Sequence: Synthetic polypeptide
HAEGTFTSDVSSYLEGQAAKEFIAWLVRGRGRK

SEQ ID NO: 177 - protein, 33 aa, synthetic construct; identical to SEQ ID NO: 96
  REGION 1..33: note = Description of Artificial Sequence: Synthetic polypeptide

SEQ ID NO: 178 - protein, 32 aa, synthetic construct
  REGION 1..32: note = Description of Artificial Sequence: Synthetic polypeptide
HGEGTFTSDVSSYLEGQAAREFIAWLVKGRGK

SEQ ID NO: 179 - protein, 32 aa, synthetic construct
  REGION 1..32: note = Description of Artificial Sequence: Synthetic polypeptide
HGEGTFTSDVSSYLEGQAAREFIAWLVRGKGK

SEQ ID NO: 180 - protein, 38 aa, synthetic construct
  REGION 1..38: note = Description of Artificial Sequence: Synthetic polypeptide
FLFHYSKTQKLGKSNVVEELQSPFASQSRGYFLFRPRN

SEQ ID NO: 181 - protein, 33 aa, Homo sapiens; identical to SEQ ID NO: 35

SEQ ID NO: 182 - protein, 12 aa, synthetic construct
  REGION 1..12: note = Description of Artificial Sequence: Synthetic peptide
GESPGGSSGSES

SEQ ID NO: 183 - protein, 12 aa, synthetic construct
  REGION 1..12: note = Description of Artificial Sequence: Synthetic peptide
GSEGSSGPGESS

SEQ ID NO: 184 - protein, 12 aa, synthetic construct
  REGION 1..12: note = Description of Artificial Sequence: Synthetic peptide
GSSESGSSEGGP

SEQ ID NO: 185 - protein, 12 aa, synthetic construct
  REGION 1..12: note = Description of Artificial Sequence: Synthetic peptide
GSGGEPSESGSS

SEQ ID NO: 186 - protein, 12 aa, synthetic construct
  REGION 1..12: note = Description of Artificial Sequence: Synthetic peptide
GSPAGSPTSTEE

SEQ ID NO: 187 - protein, 12 aa, synthetic construct
  REGION 1..12: note = Description of Artificial Sequence: Synthetic peptide
GSEPATSGSETP

SEQ ID NO: 188 - protein, 12 aa, synthetic construct
  REGION 1..12: note = Description of Artificial Sequence: Synthetic peptide
GTSESATPESGP

SEQ ID NO: 189 - protein, 12 aa, synthetic construct
  REGION 1..12: note = Description of Artificial Sequence: Synthetic peptide
GTSTEPSEGSAP

SEQ ID NO: 190 - protein, 12 aa, synthetic construct
  REGION 1..12: note = Description of Artificial Sequence: Synthetic peptide
GSTSESPSGTAP

SEQ ID NO: 191 - protein, 12 aa, synthetic construct
  REGION 1..12: note = Description of Artificial Sequence: Synthetic peptide
GTSTPESGSASP

SEQ ID NO: 192 - protein, 12 aa, synthetic construct
  REGION 1..12: note = Description of Artificial Sequence: Synthetic peptide
GTSPSGESSTAP

SEQ ID NO: 193 - protein, 12 aa, synthetic construct
  REGION 1..12: note = Description of Artificial Sequence: Synthetic peptide
GSTSSTAESPGP

SEQ ID NO: 194 - protein, 12 aa, synthetic construct
  REGION 1..12: note = Description of Artificial Sequence: Synthetic peptide
GTPGSGTASSSP

SEQ ID NO: 195 - protein, 12 aa, synthetic construct
  REGION 1..12: note = Description of Artificial Sequence: Synthetic peptide
GSSTPSGATGSP

SEQ ID NO: 196 - protein, 12 aa, synthetic construct
  REGION 1..12: note = Description of Artificial Sequence: Synthetic peptide
GSSPSASTGTGP

SEQ ID NO: 197 - protein, 12 aa, synthetic construct
  REGION 1..12: note = Description of Artificial Sequence: Synthetic peptide
GASPGTSSTGSP

SEQ ID NO: 198 - protein, 12 aa, synthetic construct
  REGION 1..12: note = Description of Artificial Sequence: Synthetic peptide
GEPAGSPTSTSE

SEQ ID NO: 199 - protein, 12 aa, synthetic construct
  REGION 1..12: note = Description of Artificial Sequence: Synthetic peptide
GTGEPSSTPASE

SEQ ID NO: 200 - protein, 12 aa, synthetic construct
  REGION 1..12: note = Description of Artificial Sequence: Synthetic peptide
GSGPSTESAPTE

SEQ ID NO: 201 - protein, 12 aa, synthetic construct
  REGION 1..12: note = Description of Artificial Sequence: Synthetic peptide
GSETPSGPSETA

SEQ ID NO: 202 - protein, 12 aa, synthetic construct
  REGION 1..12: note = Description of Artificial Sequence: Synthetic peptide
GPSETSTSEPGA

SEQ ID NO: 203 - protein, 12 aa, synthetic construct
  REGION 1..12: note = Description of Artificial Sequence: Synthetic peptide
GSPSEPTEGTSA

SEQ ID NO: 204-221 - skipped (18 entries)

SEQ ID NO: 222 - protein, 8 aa, synthetic construct
  REGION 1..8: note = Description of Artificial Sequence: Synthetic peptide
LTPRSLLV

SEQ ID NO: 223 - protein, 8 aa, synthetic construct
  REGION 1..8: note = Description of Artificial Sequence: Synthetic peptide
LTPRSLLV

SEQ ID NO: 224 - protein, 8 aa, synthetic construct
  REGION 1..8: note = Description of Artificial Sequence: Synthetic peptide
KLTRVVGG

SEQ ID NO: 225 - protein, 8 aa, synthetic construct
  REGION 1..8: note = Description of Artificial Sequence: Synthetic peptide
TMTRIVGG

SEQ ID NO: 226 - protein, 8 aa, synthetic construct
  REGION 1..8: note = Description of Artificial Sequence: Synthetic peptide
SPFRSTGG

SEQ ID NO: 227 - protein, 8 aa, synthetic construct
  REGION 1..8: note = Description of Artificial Sequence: Synthetic peptide
LQVRIVGG

SEQ ID NO: 228 - protein, 8 aa, synthetic construct
  REGION 1..8: note = Description of Artificial Sequence: Synthetic peptide
PLGRIVGG

SEQ ID NO: 229 - protein, 8 aa, synthetic construct
  REGION 1..8: note = Description of Artificial Sequence: Synthetic peptide
IEGRTVGG

SEQ ID NO: 230 - protein, 8 aa, synthetic construct
  REGION 1..8: note = Description of Artificial Sequence: Synthetic peptide
LTPRSLLV

SEQ ID NO: 231 - protein, 8 aa, synthetic construct
  REGION 1..8: note = Description of Artificial Sequence: Synthetic peptide
LGPVSGVP

SEQ ID NO: 232 - protein, 8 aa, synthetic construct
  REGION 1..8: note = Description of Artificial Sequence: Synthetic peptide
VAGDSLEE

SEQ ID NO: 233 - protein, 8 aa, synthetic construct
  REGION 1..8: note = Description of Artificial Sequence: Synthetic peptide
GPAGLGGA

SEQ ID NO: 234 - protein, 8 aa, synthetic construct
  REGION 1..8: note = Description of Artificial Sequence: Synthetic peptide
GPAGLRGA

SEQ ID NO: 235 - protein, 8 aa, synthetic construct
  REGION 1..8: note = Description of Artificial Sequence: Synthetic peptide
APLGLRLR

SEQ ID NO: 236 - protein, 8 aa, synthetic construct
  REGION 1..8: note = Description of Artificial Sequence: Synthetic peptide
PALPLVAQ

SEQ ID NO: 237 - protein, 7 aa, synthetic construct
  REGION 1..7: note = Description of Artificial Sequence: Synthetic peptide
ENLYFQG

SEQ ID NO: 238 - protein, 8 aa, synthetic construct
  REGION 1..8: note = Description of Artificial Sequence: Synthetic peptide
DDDKIVGG

SEQ ID NO: 239 - protein, 8 aa, synthetic construct
  REGION 1..8: note = Description of Artificial Sequence: Synthetic peptide
LEVLFQGP

SEQ ID NO: 240 - protein, 8 aa, synthetic construct
  REGION 1..8: note = Description of Artificial Sequence: Synthetic peptide
LPKTGSES

SEQ ID NO: 241 - protein, 8 aa, synthetic construct
  REGION 1..8: note = Description of Artificial Sequence: Synthetic peptide
  MOD_RES 2: note = Pro or Ala
  MOD_RES 3: note = Any amino acid
  MOD_RES 6: note = Any amino acid
  MOD_RES 8: note = Any amino acid
GXXGLXGX

SEQ ID NO: 242 - protein, 8 aa, synthetic construct
  REGION 1..8: note = Description of Artificial Sequence: Synthetic peptide
  MOD_RES 3: note = Any amino acid
  MOD_RES 6: note = Any amino acid
  MOD_RES 7: note = Gly or Ala
  MOD_RES 8: note = Any amino acid
GPXGLXXX

SEQ ID NO: 243 - protein, 8 aa, synthetic construct
  REGION 1..8: note = Description of Artificial Sequence: Synthetic peptide
ENLYFQGS

SEQ ID NO: 244 - protein, 8 aa, synthetic construct
  REGION 1..8: note = Description of Artificial Sequence: Synthetic peptide
DDDKIVGG

SEQ ID NO: 245 - protein, 8 aa, synthetic construct
  REGION 1..8: note = Description of Artificial Sequence: Synthetic peptide
LEVLFQGP

SEQ ID NO: 246 - protein, 8 aa, synthetic construct
  REGION 1..8: note = Description of Artificial Sequence: Synthetic peptide
  MOD_RES 3: note = Lys, Glu, Ala or Asp
  MOD_RES 6: note = Any amino acid
  MOD_RES 7: note = Glu, Lys or Ser
LPXTGXXS

SEQ ID NO: 247-269 - skipped (23 entries)

SEQ ID NO: 270 - protein, 177 aa, Homo sapiens
MEICRGLRSHLITLLLFLFHSETICRPSGRKSSKMQAFRIWDVNQKTFYLRNNQLVAGYLQGPNVNLEEKIDVVPIEPHALFLGIHGGKMCLSCVKSGDETRLQLEAVNITDLSENRKQDKRFAFIRSDSGPTTSFESAACPGWFLCTAMEADQPVSLTNMPDEGVMVTKFYFQEDE

SEQ ID NO: 271 - protein, 175 aa, Canis lupus
METCRCPLSYLISFLLFLPHSETACRLGKRPCRMQAFRIWDVNQKTFYLRNNQLVAGYLQGSNTKLEEKLDVVPVEPHAVFLGIHGGKLCLACVKSGDETRLQLEAVNITDLSKNKDQDKRFTFILSDSGPTTSFESAACPGWFLCTALEADRPVSLTNRPEEAMMVTKFYFQKE

SEQ ID NO: 272 - protein, 176 aa, Oryctolagus cuniculus
MRPSRSTRRHLISLLLFLFHSETACRPSGKRPCRMQAFRIWDVNQKTFYLRNNQLVAGYLQGPNAKLEERIDVVPLEPQLLFLGIQRGKLCLSCVKSGDKMKLHLEAVNITDLGKNKEQDKRFTFIRSNSGPTTTFESASCPGWFLCTALEADQPVSLTNTPDDSIVVTKFYFQED

SEQ ID NO: 273 - protein, 178 aa, Rattus norvegicus
MEICRGPYSHLISLLLILLFRSESAGHIPAGKRPCKMQAFRIWDTNQKTFYLRNNQLIAGYLQGPNTKLEEKIDMVPIDFRNVFLGIHGGKLCLSCVKSGDDTKLQLEEVNITDLNKNKEEDKRFTFIRSETGPTTSFESLACPGWFLCTTLEADHPVSLTNTPKEPCTVTKFYFQED

SEQ ID NO: 274 - protein, 178 aa, Mus musculus
MEICWGPYSHLISLLLILLFHSEAACRPSGKRPCKMQAFRIWDTNQKTFYLRNNQLIAGYLQGPNIKLEEKIDMVPIDLHSVFLGIHGGKLCLSCAKSGDDIKLQLEEVNITDLSKNKEEDKRFTFIRSEKGPTTSFESAACPGWFLCTTLEADRPVSLTNTPEEPLIVTKFYFQEDQ

SEQ ID NO: 275 - protein, 153 aa, synthetic construct
  REGION 1..153: note = Description of Artificial Sequence: Synthetic polypeptide
MRPSGRKSSKMQAFRIWDVNQKTFYLRNNQLVAGYLQGPNVNLEEKIDVVPIEPHALFLGIHGGKMCLSCVKSGDETRLQLEAVNITDLSENRKQDKRFAFIRSDSGPTTSFESAACPGWFLCTAMEADQPVSLTNMPDEGVMVTKFYFQEDE

SEQ ID NO: 276 - protein, 178 aa, unidentified
  REGION 1..178: note = Description of Unknown: IL-10 sequence
MHSSALLCCLVLLTGVRASPGQGTQSENSCTHFPGNLPNMLRDLRDAFSRVKTFFQMKDQLDNLLLKESLLEDFKGYLGCQALSEMIQFYLEEVMPQAENQDPDIKAHVNSLGENLKTLRLRLRRCHRFLPCENKSKAVEQVKNAFNKLQEKGIYKAMSEFDIFINYIEAYMTMKIRN

SEQ ID NO: 277 - protein, 11 aa, synthetic construct
  REGION 1..11: note = Description of Artificial Sequence: Synthetic peptide
YGRKKRRQRRR

SEQ ID NO: 278 - protein, 12 aa, synthetic construct
  REGION 1..12: note = Description of Artificial Sequence: Synthetic peptide
RRQRRTSKLMKR

SEQ ID NO: 279 - protein, 27 aa, synthetic construct
  REGION 1..27: note = Description of Artificial Sequence: Synthetic peptide
GWTLNSAGYLLGKINLKALAALAKKIL

SEQ ID NO: 280 - protein, 33 aa, synthetic construct
  REGION 1..33: note = Description of Artificial Sequence: Synthetic polypeptide
KALAWEAKLAKALAKALAKHLAKALAKALKCEA

SEQ ID NO: 281 - protein, 16 aa, synthetic construct
  REGION 1..16: note = Description of Artificial Sequence: Synthetic peptide
RQIKIWFQNRRMKWKK

SEQ ID NO: 282 - protein, 11 aa, synthetic construct
  REGION 1..11: note = Description of Artificial Sequence: Synthetic peptide
YGRKKRRQRRR

SEQ ID NO: 283 - protein, 9 aa, synthetic construct
  REGION 1..9: note = Description of Artificial Sequence: Synthetic peptide
RKKRRQRRR

SEQ ID NO: 284 - protein, 11 aa, synthetic construct
  REGION 1..11: note = Description of Artificial Sequence: Synthetic peptide
YGRKKRRQRRR

SEQ ID NO: 285 - protein, 8 aa, synthetic construct
  REGION 1..8: note = Description of Artificial Sequence: Synthetic peptide
RKKRRQRR

SEQ ID NO: 286 - protein, 11 aa, synthetic construct
  REGION 1..11: note = Description of Artificial Sequence: Synthetic peptide
YARAAARQARA

SEQ ID NO: 287 - protein, 11 aa, synthetic construct
  REGION 1..11: note = Description of Artificial Sequence: Synthetic peptide
THRLPRRRRRR

SEQ ID NO: 288 - protein, 11 aa, synthetic construct
  REGION 1..11: note = Description of Artificial Sequence: Synthetic peptide
GGRRARRRRRR

SEQ ID NO: 289-675 - skipped (387 entries)

SEQ ID NO: 676 - protein, 144 aa, synthetic construct
  REGION 1..144: note = Description of Artificial Sequence: Synthetic polypeptide
GSEPATSGSETPGTSESATPESGPGSEPATSGSETPGSPAGSPTSTEEGTSTEPSEGSAPGSEPATSGSETPGSEPATSGSETPGSEPATSGSETPGTSTEPSEGSAPGTSESATPESGPGSEPATSGSETPGTSTEPSEGSAP

SEQ ID NO: 677 - protein, 144 aa, synthetic construct
  REGION 1..144: note = Description of Artificial Sequence: Synthetic polypeptide
SPAGSPTSTEEGTSESATPESGPGTSTEPSEGSAPGSPAGSPTSTEEGTSTEPSEGSAPGTSTEPSEGSAPGTSESATPESGPGSEPATSGSETPGSEPATSGSETPGSPAGSPTSTEEGTSESATPESGPGTSTEPSEGSAPG

SEQ ID NO: 678 - protein, 144 aa, synthetic construct
  REGION 1..144: note = Description of Artificial Sequence: Synthetic polypeptide
TSTEPSEGSAPGSPAGSPTSTEEGTSTEPSEGSAPGTSTEPSEGSAPGTSESATPESGPGTSTEPSEGSAPGTSESATPESGPGSEPATSGSETPGTSTEPSEGSAPGTSTEPSEGSAPGTSESATPESGPGTSESATPESGPG

SEQ ID NO: 679 - protein, 144 aa, synthetic construct; identical to SEQ ID NO: 678
  REGION 1..144: note = Description of Artificial Sequence: Synthetic polypeptide

SEQ ID NO: 680 - protein, 144 aa, synthetic construct
  REGION 1..144: note = Description of Artificial Sequence: Synthetic polypeptide
SPAGSPTSTEEGTSESATPESGPGSEPATSGSETPGTSESATPESGPGTSTEPSEGSAPGTSTEPSEGSAPGTSTEPSEGSAPGTSTEPSEGSAPGTSTEPSEGSAPGTSTEPSEGSAPGSPAGSPTSTEEGTSTEPSEGSAPG

SEQ ID NO: 681 - protein, 144 aa, synthetic construct; identical to SEQ ID NO: 680
  REGION 1..144: note = Description of Artificial Sequence: Synthetic polypeptide

SEQ ID NO: 682 - protein, 144 aa, synthetic construct
  REGION 1..144: note = Description of Artificial Sequence: Synthetic polypeptide
TSESATPESGPGSEPATSGSETPGTSESATPESGPGSEPATSGSETPGTSESATPESGPGTSTEPSEGSAPGTSESATPESGPGSPAGSPTSTEEGSPAGSPTSTEEGSPAGSPTSTEEGTSESATPESGPGTSTEPSEGSAPG

SEQ ID NO: 683 - protein, 144 aa, synthetic construct; identical to SEQ ID NO: 682
  REGION 1..144: note = Description of Artificial Sequence: Synthetic polypeptide

SEQ ID NO: 684 - protein, 144 aa, synthetic construct
  REGION 1..144: note = Description of Artificial Sequence: Synthetic polypeptide
TSESATPESGPGSEPATSGSETPGTSESATPESGPGSEPATSGSETPGTSESATPESGPGTSTEPSEGSAPGSPAGSPTSTEEGTSESATPESGPGSEPATSGSETPGTSESATPESGPGSPAGSPTSTEEGSPAGSPTSTEEG

SEQ ID NO: 685 - protein, 144 aa, synthetic construct
  REGION 1..144: note = Description of Artificial Sequence: Synthetic polypeptide
TSTEPSEGSAPGTSESATPESGPGTSESATPESGPGTSESATPESGPGSEPATSGSETPGSEPATSGSETPGSPAGSPTSTEEGTSTEPSEGSAPGTSTEPSEGSAPGSEPATSGSETPGTSESATPESGPGTSTEPSEGSAPG

SEQ ID NO: 686 - protein, 288 aa, synthetic construct
  REGION 1..288: note = Description of Artificial Sequence: Synthetic polypeptide
GTSESATPESGPGSEPATSGSETPGTSESATPESGPGSEPATSGSETPGTSESATPESGPGTSTEPSEGSAPGSPAGSPTSTEEGTSESATPESGPGSEPATSGSETPGTSESATPESGPGSPAGSPTSTEEGSPAGSPTSTEEGTSTEPSEGSAPGTSESATPESGPGTSESATPESGPGTSESATPESGPGSEPATSGSETPGSEPATSGSETPGSPAGSPTSTEEGTSTEPSEGSAPGTSTEPSEGSAPGSEPATSGSETPGTSESATPESGPGTSTEPSEGSAP

SEQ ID NO: 687 - protein, 288 aa, synthetic construct
  REGION 1..288: note = Description of Artificial Sequence: Synthetic polypeptide
GSPAGSPTSTEEGTSESATPESGPGSEPATSGSETPGTSESATPESGPGTSTEPSEGSAPGTSTEPSEGSAPGTSTEPSEGSAPGTSTEPSEGSAPGTSTEPSEGSAPGTSTEPSEGSAPGSPAGSPTSTEEGTSTEPSEGSAPGTSESATPESGPGSEPATSGSETPGTSESATPESGPGSEPATSGSETPGTSESATPESGPGTSTEPSEGSAPGTSESATPESGPGSPAGSPTSTEEGSPAGSPTSTEEGSPAGSPTSTEEGTSESATPESGPGTSTEPSEGSAP

SEQ ID NO: 688 - protein, 576 aa, synthetic construct
  REGION 1..576: note = Description of Artificial Sequence: Synthetic polypeptide
GSPAGSPTSTEEGTSESATPESGPGTSTEPSEGSAPGSPAGSPTSTEEGTSTEPSEGSAPGTSTEPSEGSAPGTSESATPESGPGSEPATSGSETPGSEPATSGSETPGSPAGSPTSTEEGTSESATPESGPGTSTEPSEGSAPGTSTEPSEGSAPGSPAGSPTSTEEGTSTEPSEGSAPGTSTEPSEGSAPGTSESATPESGPGTSTEPSEGSAPGTSESATPESGPGSEPATSGSETPGTSTEPSEGSAPGTSTEPSEGSAPGTSESATPESGPGTSESATPESGPGSPAGSPTSTEEGTSESATPESGPGSEPATSGSETPGTSESATPESGPGTSTEPSEGSAPGTSTEPSEGSAPGTSTEPSEGSAPGTSTEPSEGSAPGTSTEPSEGSAPGTSTEPSEGSAPGSPAGSPTSTEEGTSTEPSEGSAPGTSESATPESGPGSEPATSGSETPGTSESATPESGPGSEPATSGSETPGTSESATPESGPGTSTEPSEGSAPGTSESATPESGPGSPAGSPTSTEEGSPAGSPTSTEEGSPAGSPTSTEEGTSESATPESGPGTSTEPSEGSAP

SEQ ID NO: 689 - protein, 625 aa, synthetic construct
  REGION 1..625: note = Description of Artificial Sequence: Synthetic polypeptide
MAEPAGSPTSTEEGTPGSGTASSSPGSSTPSGATGSPGASPGTSSTGSPGSPAGSPTSTEEGTSESATPESGPGTSTEPSEGSAPGSPAGSPTSTEEGTSTEPSEGSAPGTSTEPSEGSAPGTSESATPESGPGSEPATSGSETPGSEPATSGSETPGSPAGSPTSTEEGTSESATPESGPGTSTEPSEGSAPGTSTEPSEGSAPGSPAGSPTSTEEGTSTEPSEGSAPGTSTEPSEGSAPGTSESATPESGPGTSTEPSEGSAPGTSESATPESGPGSEPATSGSETPGTSTEPSEGSAPGTSTEPSEGSAPGTSESATPESGPGTSESATPESGPGSPAGSPTSTEEGTSESATPESGPGSEPATSGSETPGTSESATPESGPGTSTEPSEGSAPGTSTEPSEGSAPGTSTEPSEGSAPGTSTEPSEGSAPGTSTEPSEGSAPGTSTEPSEGSAPGSPAGSPTSTEEGTSTEPSEGSAPGTSESATPESGPGSEPATSGSETPGTSESATPESGPGSEPATSGSETPGTSESATPESGPGTSTEPSEGSAPGTSESATPESGPGSPAGSPTSTEEGSPAGSPTSTEEGSPAGSPTSTEEGTSESATPESGPGTSTEPSEGSAP

SEQ ID NO: 690 - protein, 864 aa, synthetic construct
  REGION 1..864: note = Description of Artificial Sequence: Synthetic polypeptide
GSPAGSPTSTEEGTSESATPESGPGTSTEPSEGSAPGSPAGSPTSTEEGTSTEPSEGSAPGTSTEPSEGSAPGTSESATPESGPGSEPATSGSETPGSEPATSGSETPGSPAGSPTSTEEGTSESATPESGPGTSTEPSEGSAPGTSTEPSEGSAPGSPAGSPTSTEEGTSTEPSEGSAPGTSTEPSEGSAPGTSESATPESGPGTSTEPSEGSAPGTSESATPESGPGSEPATSGSETPGTSTEPSEGSAPGTSTEPSEGSAPGTSESATPESGPGTSESATPESGPGSPAGSPTSTEEGTSESATPESGPGSEPATSGSETPGTSESATPESGPGTSTEPSEGSAPGTSTEPSEGSAPGTSTEPSEGSAPGTSTEPSEGSAPGTSTEPSEGSAPGTSTEPSEGSAPGSPAGSPTSTEEGTSTEPSEGSAPGTSESATPESGPGSEPATSGSETPGTSESATPESGPGSEPATSGSETPGTSESATPESGPGTSTEPSEGSAPGTSESATPESGPGSPAGSPTSTEEGSPAGSPTSTEEGSPAGSPTSTEEGTSESATPESGPGTSTEPSEGSAPGTSESATPESGPGSEPATSGSETPGTSESATPESGPGSEPATSGSETPGTSESATPESGPGTSTEPSEGSAPGSPAGSPTSTEEGTSESATPESGPGSEPATSGSETPGTSESATPESGPGSPAGSPTSTEEGSPAGSPTSTEEGTSTEPSEGSAPGTSESATPESGPGTSESATPESGPGTSESATPESGPGSEPATSGSETPGSEPATSGSETPGSPAGSPTSTEEGTSTEPSEGSAPGTSTEPSEGSAPGSEPATSGSETPGTSESATPESGPGTSTEPSEGSAP

SEQ ID NO: 691 - protein, 865 aa, synthetic construct
  REGION 1..865: note = Description of Artificial Sequence: Synthetic polypeptide
GGSPAGSPTSTEEGTSESATPESGPGTSTEPSEGSAPGSPAGSPTSTEEGTSTEPSEGSAPGTSTEPSEGSAPGTSESATPESGPGSEPATSGSETPGSEPATSGSETPGSPAGSPTSTEEGTSESATPESGPGTSTEPSEGSAPGTSTEPSEGSAPGSPAGSPTSTEEGTSTEPSEGSAPGTSTEPSEGSAPGTSESATPESGPGTSTEPSEGSAPGTSESATPESGPGSEPATSGSETPGTSTEPSEGSAPGTSTEPSEGSAPGTSESATPESGPGTSESATPESGPGSPAGSPTSTEEGTSESATPESGPGSEPATSGSETPGTSESATPESGPGTSTEPSEGSAPGTSTEPSEGSAPGTSTEPSEGSAPGTSTEPSEGSAPGTSTEPSEGSAPGTSTEPSEGSAPGSPAGSPTSTEEGTSTEPSEGSAPGTSESATPESGPGSEPATSGSETPGTSESATPESGPGSEPATSGSETPGTSESATPESGPGTSTEPSEGSAPGTSESATPESGPGSPAGSPTSTEEGSPAGSPTSTEEGSPAGSPTSTEEGTSESATPESGPGTSTEPSEGSAPGTSESATPESGPGSEPATSGSETPGTSESATPESGPGSEPATSGSETPGTSESATPESGPGTSTEPSEGSAPGSPAGSPTSTEEGTSESATPESGPGSEPATSGSETPGTSESATPESGPGSPAGSPTSTEEGSPAGSPTSTEEGTSTEPSEGSAPGTSESATPESGPGTSESATPESGPGTSESATPESGPGSEPATSGSETPGSEPATSGSETPGSPAGSPTSTEEGTSTEPSEGSAPGTSTEPSEGSAPGSEPATSGSETPGTSESATPESGPGTSTEPSEGSAP

SEQ ID NO: 692 - protein, 866 aa, synthetic construct
  REGION 1..866: note = Description of Artificial Sequence: Synthetic polypeptide
PGSPAGSPTSTEEGTSESATPESGPGTSTEPSEGSAPGSPAGSPTSTEEGTSTEPSEGSAPGTSTEPSEGSAPGTSESATPESGPGSEPATSGSETPGSEPATSGSETPGSPAGSPTSTEEGTSESATPESGPGTSTEPSEGSAPGTSTEPSEGSAPGSPAGSPTSTEEGTSTEPSEGSAPGTSTEPSEGSAPGTSESATPESGPGTSTEPSEGSAPGTSESATPESGPGSEPATSGSETPGTSTEPSEGSAPGTSTEPSEGSAPGTSESATPESGPGTSESATPESGPGSPAGSPTSTEEGTSESATPESGPGSEPATSGSETPGTSESATPESGPGTSTEPSEGSAPGTSTEPSEGSAPGTSTEPSEGSAPGTSTEPSEGSAPGTSTEPSEGSAPGTSTEPSEGSAPGSPAGSPTSTEEGTSTEPSEGSAPGTSESATPESGPGSEPATSGSETPGTSESATPESGPGSEPATSGSETPGTSESATPESGPGTSTEPSEGSAPGTSESATPESGPGSPAGSPTSTEEGSPAGSPTSTEEGSPAGSPTSTEEGTSESATPESGPGTSTEPSEGSAPGTSESATPESGPGSEPATSGSETPGTSESATPESGPGSEPATSGSETPGTSESATPESGPGTSTEPSEGSAPGSPAGSPTSTEEGTSESATPESGPGSEPATSGSETPGTSESATPESGPGSPAGSPTSTEEGSPAGSPTSTEEGTSTEPSEGSAPGTSESATPESGPGTSESATPESGPGTSESATPESGPGSEPATSGSETPGSEPATSGSETPGSPAGSPTSTEEGTSTEPSEGSAPGTSTEPSEGSAPGSEPATSGSETPGTSESATPESGPGTSTEPSEGSAPG

SEQ ID NO: 693 - protein, 1152 aa, synthetic construct
  REGION 1..1152: note = Description of Artificial Sequence: Synthetic polypeptide
GSPAGSPTSTEEGTSESATPESGPGTSTEPSEGSAPGSPAGSPTSTEEGTSTEPSEGSAPGTSTEPSEGSAPGTSESATPESGPGSEPATSGSETPGSEPATSGSETPGSPAGSPTSTEEGTSESATPESGPGTSTEPSEGSAPGTSTEPSEGSAPGSPAGSPTSTEEGTSTEPSEGSAPGTSTEPSEGSAPGTSESATPESGPGTSTEPSEGSAPGTSESATPESGPGSEPATSGSETPGTSTEPSEGSAPGTSTEPSEGSAPGTSESATPESGPGTSESATPESGPGSPAGSPTSTEEGTSESATPESGPGSEPATSGSETPGTSESATPESGPGTSTEPSEGSAPGTSTEPSEGSAPGTSTEPSEGSAPGTSTEPSEGSAPGTSTEPSEGSAPGTSTEPSEGSAPGSPAGSPTSTEEGTSTEPSEGSAPGTSESATPESGPGSEPATSGSETPGTSESATPESGPGSEPATSGSETPGTSESATPESGPGTSTEPSEGSAPGTSESATPESGPGSPAGSPTSTEEGSPAGSPTSTEEGSPAGSPTSTEEGTSESATPESGPGTSTEPSEGSAPGTSESATPESGPGSEPATSGSETPGTSESATPESGPGSEPATSGSETPGTSESATPESGPGTSTEPSEGSAPGSPAGSPTSTEEGTSESATPESGPGSEPATSGSETPGTSESATPESGPGSPAGSPTSTEEGSPAGSPTSTEEGTSTEPSEGSAPGTSESATPESGPGTSESATPESGPGTSESATPESGPGSEPATSGSETPGSEPATSGSETPGSPAGSPTSTEEGTSTEPSEGSAPGTSTEPSEGSAPGSEPATSGSETPGTSESATPESGPGTSTEPSEGSAPGTSESATPESGPGSEPATSGSETPGTSESATPESGPGSEPATSGSETPGTSESATPESGPGTSTEPSEGSAPGSPAGSPTSTEEGTSESATPESGPGSEPATSGSETPGTSESATPESGPGSPAGSPTSTEEGSPAGSPTSTEEGTSTEPSEGSAPGTSESATPESGPGTSESATPESGPGTSESATPESGPGSEPATSGSETPGSEPATSGSETPGSPAGSPTSTEEGTSTEPSEGSAPGTSTEPSEGSAPGSEPATSGSETPGTSESATPESGPGTSTEPSEGSAP

SEQ ID NO: 694 - protein, 144 aa, synthetic construct
  REGION 1..144: note = Description of Artificial Sequence: Synthetic polypeptide
STEPSEGSAPGSPAGSPTSTEEGTSTEPSEGSAPGTSESATPESGPGSEPATSGSETPGTSESATPESGPGSEPATSGSETPGTSESATPESGPGTSTEPSEGSAPGTSESATPESGPGSPAGSPTSTEEGSPAGSPTSTEEGS

SEQ ID NO: 695 - protein, 144 aa, synthetic construct
  REGION 1..144: note = Description of Artificial Sequence: Synthetic polypeptide
SEPATSGSETPGTSESATPESGPGSEPATSGSETPGTSESATPESGPGTSTEPSEGSAPGSPAGSPTSTEEGTSESATPESGPGSEPATSGSETPGTSESATPESGPGSPAGSPTSTEEGSPAGSPTSTEEGTSTEPSEGSAPG

SEQ ID NO: 696 - protein, 180 aa, synthetic construct
  REGION 1..180: note = Description of Artificial Sequence: Synthetic polypeptide
TSTEEGTSESATPESGPGSEPATSGSETPGTSESATPESGPGSPAGSPTSTEEGSPAGSPTSTEEGTSTEPSEGSAPGTSESATPESGPGTSESATPESGPGTSESATPESGPGSEPATSGSETPGSEPATSGSETPGSPAGSPTSTEEGTSTEPSEGSAPGTSTEPSEGSAPGSEPATS

SEQ ID NO: 697 - protein, 216 aa, synthetic construct
  REGION 1..216: note = Description of Artificial Sequence: Synthetic polypeptide
PESGPGTSTEPSEGSAPGSPAGSPTSTEEGTSESATPESGPGSEPATSGSETPGTSESATPESGPGSPAGSPTSTEEGSPAGSPTSTEEGTSTEPSEGSAPGTSESATPESGPGTSESATPESGPGTSESATPESGPGSEPATSGSETPGSEPATSGSETPGSPAGSPTSTEEGTSTEPSEGSAPGTSTEPSEGSAPGSEPATSGSETPGTSESAT

SEQ ID NO: 698 - protein, 252 aa, synthetic construct
  REGION 1..252: note = Description of Artificial Sequence: Synthetic polypeptide
ESGPGSEPATSGSETPGTSESATPESGPGTSTEPSEGSAPGSPAGSPTSTEEGTSESATPESGPGSEPATSGSETPGTSESATPESGPGSPAGSPTSTEEGSPAGSPTSTEEGTSTEPSEGSAPGTSESATPESGPGTSESATPESGPGTSESATPESGPGSEPATSGSETPGSEPATSGSETPGSPAGSPTSTEEGTSTEPSEGSAPGTSTEPSEGSAPGSEPATSGSETPGTSESATPESGPGTSTEPSE

SEQ ID NO: 699 - protein, 288 aa, synthetic construct
  REGION 1..288: note = Description of Artificial Sequence: Synthetic polypeptide
TPESGPGTSTEPSEGSAPGTSESATPESGPGSEPATSGSETPGTSESATPESGPGSEPATSGSETPGTSESATPESGPGTSTEPSEGSAPGSPAGSPTSTEEGTSESATPESGPGSEPATSGSETPGTSESATPESGPGSPAGSPTSTEEGSPAGSPTSTEEGTSTEPSEGSAPGTSESATPESGPGTSESATPESGPGTSESATPESGPGSEPATSGSETPGSEPATSGSETPGSPAGSPTSTEEGTSTEPSEGSAPGTSTEPSEGSAPGSEPATSGSETPGTSESA

SEQ ID NO: 700 - protein, 324 aa, synthetic construct
  REGION 1..324: note = Description of Artificial Sequence: Synthetic polypeptide
PESGPGSPAGSPTSTEEGSPAGSPTSTEEGSPAGSPTSTEEGTSESATPESGPGTSTEPSEGSAPGTSESATPESGPGSEPATSGSETPGTSESATPESGPGSEPATSGSETPGTSESATPESGPGTSTEPSEGSAPGSPAGSPTSTEEGTSESATPESGPGSEPATSGSETPGTSESATPESGPGSPAGSPTSTEEGSPAGSPTSTEEGTSTEPSEGSAPGTSESATPESGPGTSESATPESGPGTSESATPESGPGSEPATSGSETPGSEPATSGSETPGSPAGSPTSTEEGTSTEPSEGSAPGTSTEPSEGSAPGSEPATS

SEQ ID NO: 701 - protein, 360 aa, synthetic construct
  REGION 1..360: note = Description of Artificial Sequence: Synthetic polypeptide
PESGPGTSTEPSEGSAPGTSESATPESGPGSPAGSPTSTEEGSPAGSPTSTEEGSPAGSPTSTEEGTSESATPESGPGTSTEPSEGSAPGTSESATPESGPGSEPATSGSETPGTSESATPESGPGSEPATSGSETPGTSESATPESGPGTSTEPSEGSAPGSPAGSPTSTEEGTSESATPESGPGSEPATSGSETPGTSESATPESGPGSPAGSPTSTEEGSPAGSPTSTEEGTSTEPSEGSAPGTSESATPESGPGTSESATPESGPGTSESATPESGPGSEPATSGSETPGSEPATSGSETPGSPAGSPTSTEEGTSTEPSEGSAPGTSTEPSEGSAPGSEPATSGSETPGTSESAT

SEQ ID NO: 702 - protein, 360 aa, synthetic construct
  REGION 1..360: note = Description of Artificial Sequence: Synthetic polypeptide
PESGPGSEPATSGSETPGTSESATPESGPGTSTEPSEGSAPGTSESATPESGPGSPAGSPTSTEEGSPAGSPTSTEEGSPAGSPTSTEEGTSESATPESGPGTSTEPSEGSAPGTSESATPESGPGSEPATSGSETPGTSESATPESGPGSEPATSGSETPGTSESATPESGPGTSTEPSEGSAPGSPAGSPTSTEEGTSESATPESGPGSEPATSGSETPGTSESATPESGPGSPAGSPTSTEEGSPAGSPTSTEEGTSTEPSEGSAPGTSESATPESGPGTSESATPESGPGTSESATPESGPGSEPATSGSETPGSEPATSGSETPGSPAGSPTSTEEGTSTEPSEGSAPGTSTEPS

SEQ ID NO: 703 - protein, 432 aa, synthetic construct
  REGION 1..432: note = Description of Artificial Sequence: Synthetic polypeptide
EGSAPGSPAGSPTSTEEGTSTEPSEGSAPGTSESATPESGPGSEPATSGSETPGTSESATPESGPGSEPATSGSETPGTSESATPESGPGTSTEPSEGSAPGTSESATPESGPGSPAGSPTSTEEGSPAGSPTSTEEGSPAGSPTSTEEGTSESATPESGPGTSTEPSEGSAPGTSESATPESGPGSEPATSGSETPGTSESATPESGPGSEPATSGSETPGTSESATPESGPGTSTEPSEGSAPGSPAGSPTSTEEGTSESATPESGPGSEPATSGSETPGTSESATPESGPGSPAGSPTSTEEGSPAGSPTSTEEGTSTEPSEGSAPGTSESATPESGPGTSESATPESGPGTSESATPESGPGSEPATSGSETPGSEPATSGSETPGSPAGSPTSTEEGTSTEPSEGSAPGTSTEPSEGSAPGSEPATS

SEQ ID NO: 704 - protein, 468 aa, synthetic construct
  REGION 1..468: note = Description of Artificial Sequence: Synthetic polypeptide
EGSAPGTSTEPSEGSAPGTSTEPSEGSAPGSPAGSPTSTEEGTSTEPSEGSAPGTSESATPESGPGSEPATSGSETPGTSESATPESGPGSEPATSGSETPGTSESATPESGPGTSTEPSEGSAPGTSESATPESGPGSPAGSPTSTEEGSPAGSPTSTEEGSPAGSPTSTEEGTSESATPESGPGTSTEPSEGSAPGTSESATPESGPGSEPATSGSETPGTSESATPESGPGSEPATSGSETPGTSESATPESGPGTSTEPSEGSAPGSPAGSPTSTEEGTSESATPESGPGSEPATSGSETPGTSESATPESGPGSPAGSPTSTEEGSPAGSPTSTEEGTSTEPSEGSAPGTSESATPESGPGTSESATPESGPGTSESATPESGPGSEPATSGSETPGSEPATSGSETPGSPAGSPTSTEEGTSTEPSEGSAPGTSTEPSEGSAPGSEPATSGSETPGTSESAT

SEQ ID NO: 705 - protein, 504 aa, synthetic construct
  REGION 1..504: note = Description of Artificial Sequence: Synthetic polypeptide
EGSAPGTSTEPSEGSAPGTSTEPSEGSAPGTSTEPSEGSAPGTSTEPSEGSAPGSPAGSPTSTEEGTSTEPSEGSAPGTSESATPESGPGSEPATSGSETPGTSESATPESGPGSEPATSGSETPGTSESATPESGPGTSTEPSEGSAPGTSESATPESGPGSPAGSPTSTEEGSPAGSPTSTEEGSPAGSPTSTEEGTSESATPESGPGTSTEPSEGSAPGTSESATPESGPGSEPATSGSETPGTSESATPESGPGSEPATSGSETPGTSESATPESGPGTSTEPSEGSAPGSPAGSPTSTEEGTSESATPESGPGSEPATSGSETPGTSESATPESGPGSPAGSPTSTEEGSPAGSPTSTEEGTSTEPSEGSAPGTSESATPESGPGTSESATPESGPGTSESATPESGPGSEPATSGSETPGSEPATSGSETPGSPAGSPTSTEEGTSTEPSEGSAPGTSTEPSEGSAPGSEPATSGSETPGTSESATPESGPGTSTEPS

SEQ ID NO: 706 - protein, 540 aa, synthetic construct
  REGION 1..540: note = Description of Artificial Sequence: Synthetic polypeptide
TPESGPGSPAGSPTSTEEGTSESATPESGPGSEPATSGSETPGTSESATPESGPGTSTEPSEGSAPGTSTEPSEGSAPGTSTEPSEGSAPGTSTEPSEGSAPGTSTEPSEGSAPGTSTEPSEGSAPGSPAGSPTSTEEGTSTEPSEGSAPGTSESATPESGPGSEPATSGSETPGTSESATPESGPGSEPATSGSETPGTSESATPESGPGTSTEPSEGSAPGTSESATPESGPGSPAGSPTSTEEGSPAGSPTSTEEGSPAGSPTSTEEGTSESATPESGPGTSTEPSEGSAPGTSESATPESGPGSEPATSGSETPGTSESATPESGPGSEPATSGSETPGTSESATPESGPGTSTEPSEGSAPGSPAGSPTSTEEGTSESATPESGPGSEPATSGSETPGTSESATPESGPGSPAGSPTSTEEGSPAGSPTSTEEGTSTEPSEGSAPGTSESATPESGPGTSESATPESGPGTSESATPESGPGSEPATSGSETPGSEPATSGSETPGSPAGSPTSTEEGTSTEPSEGSAPGTSTEP

SEQ ID NO: 707 - protein, 576 aa, synthetic construct
  REGION 1..576: note = Description of Artificial Sequence: Synthetic polypeptide
TPESGPGTSESATPESGPGSPAGSPTSTEEGTSESATPESGPGSEPATSGSETPGTSESATPESGPGTSTEPSEGSAPGTSTEPSEGSAPGTSTEPSEGSAPGTSTEPSEGSAPGTSTEPSEGSAPGTSTEPSEGSAPGSPAGSPTSTEEGTSTEPSEGSAPGTSESATPESGPGSEPATSGSETPGTSESATPESGPGSEPATSGSETPGTSESATPESGPGTSTEPSEGSAPGTSESATPESGPGSPAGSPTSTEEGSPAGSPTSTEEGSPAGSPTSTEEGTSESATPESGPGTSTEPSEGSAPGTSESATPESGPGSEPATSGSETPGTSESATPESGPGSEPATSGSETPGTSESATPESGPGTSTEPSEGSAPGSPAGSPTSTEEGTSESATPESGPGSEPATSGSETPGTSESATPESGPGSPAGSPTSTEEGSPAGSPTSTEEGTSTEPSEGSAPGTSESATPESGPGTSESATPESGPGTSESATPESGPGSEPATSGSETPGSEPATSGSETPGSPAGSPTSTEEGTSTEPSEGSAPGTSTEPSEGSAPGSEPATSGSETPGTSESA

SEQ ID NO: 708 - protein, 612 aa, synthetic construct
  REGION 1..612: note = Description of Artificial Sequence: Synthetic polypeptide
GSETPGTSTEPSEGSAPGTSTEPSEGSAPGTSESATPESGPGTSESATPESGPGSPAGSPTSTEEGTSESATPESGPGSEPATSGSETPGTSESATPESGPGTSTEPSEGSAPGTSTEPSEGSAPGTSTEPSEGSAPGTSTEPSEGSAPGTSTEPSEGSAPGTSTEPSEGSAPGSPAGSPTSTEEGTSTEPSEGSAPGTSESATPESGPGSEPATSGSETPGTSESATPESGPGSEPATSGSETPGTSESATPESGPGTSTEPSEGSAPGTSESATPESGPGSPAGSPTSTEEGSPAGSPTSTEEGSPAGSPTSTEEGTSESATPESGPGTSTEPSEGSAPGTSESATPESGPGSEPATSGSETPGTSESATPESGPGSEPATSGSETPGTSESATPESGPGTSTEPSEGSAPGSPAGSPTSTEEGTSESATPESGPGSEPATSGSETPGTSESATPESGPGSPAGSPTSTEEGSPAGSPTSTEEGTSTEPSEGSAPGTSESATPESGPGTSESATPESGPGTSESATPESGPGSEPATSGSETPGSEPATSGSETPGSPAGSPTSTEEGTSTEPSEGSAPGTSTEPSEGSAPGSEPATSGSETPGTSESAT

SEQ ID NO: 709 - protein, 648 aa, synthetic construct
  REGION 1..648: note = Description of Artificial Sequence: Synthetic polypeptide
PESGPGTSTEPSEGSAPGTSESATPESGPGSEPATSGSETPGTSTEPSEGSAPGTSTEPSEGSAPGTSESATPESGPGTSESATPESGPGSPAGSPTSTEEGTSESATPESGPGSEPATSGSETPGTSESATPESGPGTSTEPSEGSAPGTSTEPSEGSAPGTSTEPSEGSAPGTSTEPSEGSAPGTSTEPSEGSAPGTSTEPSEGSAPGSPAGSPTSTEEGTSTEPSEGSAPGTSESATPESGPGSEPATSGSETPGTSESATPESGPGSEPATSGSETPGTSESATPESGPGTSTEPSEGSAPGTSESATPESGPGSPAGSPTSTEEGSPAGSPTSTEEGSPAGSPTSTEEGTSESATPESGPGTSTEPSEGSAPGTSESATPESGPGSEPATSGSETPGTSESATPESGPGSEPATSGSETPGTSESATPESGPGTSTEPSEGSAPGSPAGSPTSTEEGTSESATPESGPGSEPATSGSETPGTSESATPESGPGSPAGSPTSTEEGSPAGSPTSTEEGTSTEPSEGSAPGTSESATPESGPGTSESATPESGPGTSESATPESGPGSEPATSGSETPGSEPATSGSETPGSPAGSPTSTEEGTSTEPSEGSAPGTSTEPSEGSAPGSEPATSGSETPGTSESAT

SEQ ID NO: 710 - protein, 684 aa, synthetic construct
  REGION 1..684: note = Description of Artificial Sequence: Synthetic polypeptide
EGSAPGSPAGSPTSTEEGTSTEPSEGSAPGTSTEPSEGSAPGTSESATPESGPGTSTEPSEGSAPGTSESATPESGPGSEPATSGSETPGTSTEPSEGSAPGTSTEPSEGSAPGTSESATPESGPGTSESATPESGPGSPAGSPTSTEEGTSESATPESGPGSEPATSGSETPGTSESATPESGPGTSTEPSEGSAPGTSTEPSEGSAPGTSTEPSEGSAPGTSTEPSEGSAPGTSTEPSEGSAPGTSTEPSEGSAPGSPAGSPTSTEEGTSTEPSEGSAPGTSESATPESGPGSEPATSGSETPGTSESATPESGPGSEPATSGSETPGTSESATPESGPGTSTEPSEGSAPGTSESATPESGPGSPAGSPTSTEEGSPAGSPTSTEEGSPAGSPTSTEEGTSESATPESGPGTSTEPSEGSAPGTSESATPESGPGSEPATSGSETPGTSESATPESGPGSEPATSGSETPGTSESATPESGPGTSTEPSEGSAPGSPAGSPTSTEEGTSESATPESGPGSEPATSGSETPGTSESATPESGPGSPAGSPTSTEEGSPAGSPTSTEEGTSTEPSEGSAPGTSESATPESGPGTSESATPESGPGTSESATPESGPGSEPATSGSETPGSEPATSGSETPGSPAGSPTSTEEGTSTEPSEGSAPGTSTEPSEGSAPGSEPATS

SEQ ID NO: 711 - protein, 720 aa, synthetic construct
  REGION 1..720: note = Description of Artificial Sequence: Synthetic polypeptide
TSGSETPGSEPATSGSETPGSPAGSPTSTEEGTSESATPESGPGTSTEPSEGSAPGTSTEPSEGSAPGSPAGSPTSTEEGTSTEPSEGSAPGTSTEPSEGSAPGTSESATPESGPGTSTEPSEGSAPGTSESATPESGPGSEPATSGSETPGTSTEPSEGSAPGTSTEPSEGSAPGTSESATPESGPGTSESATPESGPGSPAGSPTSTEEGTSESATPESGPGSEPATSGSETPGTSESATPESGPGTSTEPSEGSAPGTSTEPSEGSAPGTSTEPSEGSAPGTSTEPSEGSAPGTSTEPSEGSAPGTSTEPSEGSAPGSPAGSPTSTEEGTSTEPSEGSAPGTSESATPESGPGSEPATSGSETPGTSESATPESGPGSEPATSGSETPGTSESATPESGPGTSTEPSEGSAPGTSESATPESGPGSPAGSPTSTEEGSPAGSPTSTEEGSPAGSPTSTEEGTSESATPESGPGTSTEPSEGSAPGTSESATPESGPGSEPATSGSETPGTSESATPESGPGSEPATSGSETPGTSESATPESGPGTSTEPSEGSAPGSPAGSPTSTEEGTSESATPESGPGSEPATSGSETPGTSESATPESGPGSPAGSPTSTEEGSPAGSPTSTEEGTSTEPSEGSAPGTSESATPESGPGTSESATPESGPGTSESATPESGPGSEPATSGSETPGSEPATSGSETPGSPAGSPTSTEEGTSTE

SEQ ID NO: 712 - protein, 756 aa, synthetic construct
  REGION 1..756: note = Description of Artificial Sequence: Synthetic polypeptide
TSGSETPGSEPATSGSETPGSPAGSPTSTEEGTSESATPESGPGTSTEPSEGSAPGTSTEPSEGSAPGSPAGSPTSTEEGTSTEPSEGSAPGTSTEPSEGSAPGTSESATPESGPGTSTEPSEGSAPGTSESATPESGPGSEPATSGSETPGTSTEPSEGSAPGTSTEPSEGSAPGTSESATPESGPGTSESATPESGPGSPAGSPTSTEEGTSESATPESGPGSEPATSGSETPGTSESATPESGPGTSTEPSEGSAPGTSTEPSEGSAPGTSTEPSEGSAPGTSTEPSEGSAPGTSTEPSEGSAPGTSTEPSEGSAPGSPAGSPTSTEEGTSTEPSEGSAPGTSESATPESGPGSEPATSGSETPGTSESATPESGPGSEPATSGSETPGTSESATPESGPGTSTEPSEGSAPGTSESATPESGPGSPAGSPTSTEEGSPAGSPTSTEEGSPAGSPTSTEEGTSESATPESGPGTSTEPSEGSAPGTSESATPESGPGSEPATSGSETPGTSESATPESGPGSEPATSGSETPGTSESATPESGPGTSTEPSEGSAPGSPAGSPTSTEEGTSESATPESGPGSEPATSGSETPGTSESATPESGPGSPAGSPTSTEEGSPAGSPTSTEEGTSTEPSEGSAPGTSESATPESGPGTSESATPESGPGTSESATPESGPGSEPATSGSETPGSEPATSGSETPGSPAGSPTSTEEGTSTEPSEGSAPGTSTEPSEGSAPGSEPATSGSETPGTSES

SEQ ID NO: 713 - protein, 792 aa, synthetic construct
  REGION 1..792: note = Description of Artificial Sequence: Synthetic polypeptide
EGSAPGTSESATPESGPGSEPATSGSETPGSEPATSGSETPGSPAGSPTSTEEGTSESATPESGPGTSTEPSEGSAPGTSTEPSEGSAPGSPAGSPTSTEEGTSTEPSEGSAPGTSTEPSEGSAPGTSESATPESGPGTSTEPSEGSAPGTSESATPESGPGSEPATSGSETPGTSTEPSEGSAPGTSTEPSEGSAPGTSESATPESGPGTSESATPESGPGSPAGSPTSTEEGTSESATPESGPGSEPATSGSETPGTSESATPESGPGTSTEPSEGSAPGTSTEPSEGSAPGTSTEPSEGSAPGTSTEPSEGSAPGTSTEPSEGSAPGTSTEPSEGSAPGSPAGSPTSTEEGTSTEPSEGSAPGTSESATPESGPGSEPATSGSETPGTSESATPESGPGSEPATSGSETPGTSESATPESGPGTSTEPSEGSAPGTSESATPESGPGSPAGSPTSTEEGSPAGSPTSTEEGSPAGSPTSTEEGTSESATPESGPGTSTEPSEGSAPGTSESATPESGPGSEPATSGSETPGTSESATPESGPGSEPATSGSETPGTSESATPESGPGTSTEPSEGSAPGSPAGSPTSTEEGTSESATPESGPGSEPATSGSETPGTSESATPESGPGSPAGSPTSTEEGSPAGSPTSTEEGTSTEPSEGSAPGTSESATPESGPGTSESATPESGPGTSESATPESGPGSEPATSGSETPGSEPATSGSETPGSPAGSPTSTEEGTSTEPSEGSAPGTSTEPSEGSAPGSEPATSGSETPGTSESATPESGPGTSTEPS

SEQ ID NO: 714 - protein, 828 aa, synthetic construct
  REGION 1..828: note = Description of Artificial Sequence: Synthetic polypeptide
PESGPGTSTEPSEGSAPGSPAGSPTSTEEGTSTEPSEGSAPGTSTEPSEGSAPGTSESATPESGPGSEPATSGSETPGSEPATSGSETPGSPAGSPTSTEEGTSESATPESGPGTSTEPSEGSAPGTSTEPSEGSAPGSPAGSPTSTEEGTSTEPSEGSAPGTSTEPSEGSAPGTSESATPESGPGTSTEPSEGSAPGTSESATPESGPGSEPATSGSETPGTSTEPSEGSAPGTSTEPSEGSAPGTSESATPESGPGTSESATPESGPGSPAGSPTSTEEGTSESATPESGPGSEPATSGSETPGTSESATPESGPGTSTEPSEGSAPGTSTEPSEGSAPGTSTEPSEGSAPGTSTEPSEGSAPGTSTEPSEGSAPGTSTEPSEGSAPGSPAGSPTSTEEGTSTEPSEGSAPGTSESATPESGPGSEPATSGSETPGTSESATPESGPGSEPATSGSETPGTSESATPESGPGTSTEPSEGSAPGTSESATPESGPGSPAGSPTSTEEGSPAGSPTSTEEGSPAGSPTSTEEGTSESATPESGPGTSTEPSEGSAPGTSESATPESGPGSEPATSGSETPGTSESATPESGPGSEPATSGSETPGTSESATPESGPGTSTEPSEGSAPGSPAGSPTSTEEGTSESATPESGPGSEPATSGSETPGTSESATPESGPGSPAGSPTSTEEGSPAGSPTSTEEGTSTEPSEGSAPGTSESATPESGPGTSESATPESGPGTSESATPESGPGSEPATSGSETPGSEPATSGSETPGSPAGSPTSTEEGTSTEPSEGSAPGTSTEPSEGSAPGSEPATSGSETPGTSESAT

SEQ ID NO: 715 - protein, 869 aa, synthetic construct
  REGION 1..869: note = Description of Artificial Sequence: Synthetic polypeptide
GSPGSPAGSPTSTEEGTSESATPESGPGTSTEPSEGSAPGSPAGSPTSTEEGTSTEPSEGSAPGTSTEPSEGSAPGTSESATPESGPGSEPATSGSETPGSEPATSGSETPGSPAGSPTSTEEGTSESATPESGPGTSTEPSEGSAPGTSTEPSEGSAPGSPAGSPTSTEEGTSTEPSEGSAPGTSTEPSEGSAPGTSESATPESGPGTSTEPSEGSAPGTSESATPESGPGSEPATSGSETPGTSTEPSEGSAPGTSTEPSEGSAPGTSESATPESGPGTSESATPESGPGSPAGSPTSTEEGTSESATPESGPGSEPATSGSETPGTSESATPESGPGTSTEPSEGSAPGTSTEPSEGSAPGTSTEPSEGSAPGTSTEPSEGSAPGTSTEPSEGSAPGTSTEPSEGSAPGSPAGSPTSTEEGTSTEPSEGSAPGTSESATPESGPGSEPATSGSETPGTSESATPESGPGSEPATSGSETPGTSESATPESGPGTSTEPSEGSAPGTSESATPESGPGSPAGSPTSTEEGSPAGSPTSTEEGSPAGSPTSTEEGTSESATPESGPGTSTEPSEGSAPGTSESATPESGPGSEPATSGSETPGTSESATPESGPGSEPATSGSETPGTSESATPESGPGTSTEPSEGSAPGSPAGSPTSTEEGTSESATPESGPGSEPATSGSETPGTSESATPESGPGSPAGSPTSTEEGSPAGSPTSTEEGTSTEPSEGSAPGTSESATPESGPGTSESATPESGPGTSESATPESGPGSEPATSGSETPGSEPATSGSETPGSPAGSPTSTEEGTSTEPSEGSAPGTSTEPSEGSAPGSEPATSGSETPGTSESATPESGPGTSTEPSEGSAPGR

SEQ ID NO: 716 - protein, 144 aa, synthetic construct
  REGION 1..144: note = Description of Artificial Sequence: Synthetic polypeptide
SAGSPGSPAGSPTSTEEGTSESATPESGPGTSTEPSEGSAPGSPAGSPTSTEEGTSTEPSEGSAPGTSTEPSEGSAPGTSESATPESGPGSEPATSGSETPGSEPATSGSETPGSPAGSPTSTEEGTSESATPESGPGTESASR

SEQ ID NO: 717 - protein, 288 aa, synthetic construct
  REGION 1..288: note = Description of Artificial Sequence: Synthetic polypeptide
SAGSPTGPGSEPATSGSETPGTSESATPESGPGSEPATSGSETPGTSESATPESGPGTSTEPSEGSAPGSPAGSPTSTEEGTSESATPESGPGSEPATSGSETPGTSESATPESGPGSPAGSPTSTEEGSPAGSPTSTEEGTSTEPSEGSAPGTSESATPESGPGTSESATPESGPGTSESATPESGPGSEPATSGSETPGSEPATSGSETPGSPAGSPTSTEEGTSTEPSEGSAPGTSTEPSEGSAPGSEPATSGSETPGTSESATPESGPGTSTEPSEGSAPSASR

SEQ ID NO: 718 - protein, 432 aa, synthetic construct
  REGION 1..432: note = Description of Artificial Sequence: Synthetic polypeptide
SAGSPGSPAGSPTSTEEGTSESATPESGPGTSTEPSEGSAPGSPAGSPTSTEEGTSTEPSEGSAPGTSTEPSEGSAPGTSESATPESGPGSEPATSGSETPGSEPATSGSETPGSPAGSPTSTEEGTSESATPESGPGTSTEPSEGSAPGTSTEPSEGSAPGSPAGSPTSTEEGTSTEPSEGSAPGTSTEPSEGSAPGTSESATPESGPGTSTEPSEGSAPGTSESATPESGPGSEPATSGSETPGTSTEPSEGSAPGTSTEPSEGSAPGTSESATPESGPGTSESATPESGPGSPAGSPTSTEEGTSESATPESGPGSEPATSGSETPGTSESATPESGPGTSTEPSEGSAPGTSTEPSEGSAPGTSTEPSEGSAPGTSTEPSEGSAPGTSTEPSEGSAPGTSTEPSEGSAPGSPAGSPTSTEEGTESASR

SEQ ID NO: 719 - protein, 576 aa, synthetic construct
  REGION 1..576: note = Description of Artificial Sequence: Synthetic polypeptide
SAGSPTEEGTSESATPESGPGSEPATSGSETPGTSESATPESGPGTSTEPSEGSAPGTSTEPSEGSAPGTSTEPSEGSAPGTSTEPSEGSAPGTSTEPSEGSAPGTSTEPSEGSAPGSPAGSPTSTEEGTSTEPSEGSAPGTSESATPESGPGSEPATSGSETPGTSESATPESGPGSEPATSGSETPGTSESATPESGPGTSTEPSEGSAPGTSESATPESGPGSPAGSPTSTEEGSPAGSPTSTEEGSPAGSPTSTEEGTSESATPESGPGTSTEPSEGSAPGTSESATPESGPGSEPATSGSETPGTSESATPESGPGSEPATSGSETPGTSESATPESGPGTSTEPSEGSAPGSPAGSPTSTEEGTSESATPESGPGSEPATSGSETPGTSESATPESGPGSPAGSPTSTEEGSPAGSPTSTEEGTSTEPSEGSAPGTSESATPESGPGTSESATPESGPGTSESATPESGPGSEPATSGSETPGSEPATSGSETPGSPAGSPTSTEEGTSTEPSEGSAPGTSTEPSEGSAPGSEPATSGSETPGTSESATPESGPGTSTEPSEGSAPSASR

SEQ ID NO: 720 - protein, 864 aa, synthetic construct
  REGION 1..864: note = Description of Artificial Sequence: Synthetic polypeptide
SAGSPGSPAGSPTSTEEGTSESATPESGPGTSTEPSEGSAPGSPAGSPTSTEEGTSTEPSEGSAPGTSTEPSEGSAPGTSESATPESGPGSEPATSGSETPGSEPATSGSETPGSPAGSPTSTEEGTSESATPESGPGTSTEPSEGSAPGTSTEPSEGSAPGSPAGSPTSTEEGTSTEPSEGSAPGTSTEPSEGSAPGTSESATPESGPGTSTEPSEGSAPGTSESATPESGPGSEPATSGSETPGTSTEPSEGSAPGTSTEPSEGSAPGTSESATPESGPGTSESATPESGPGSPAGSPTSTEEGTSESATPESGPGSEPATSGSETPGTSESATPESGPGTSTEPSEGSAPGTSTEPSEGSAPGTSTEPSEGSAPGTSTEPSEGSAPGTSTEPSEGSAPGTSTEPSEGSAPGSPAGSPTSTEEGTSTEPSEGSAPGTSESATPESGPGSEPATSGSETPGTSESATPESGPGSEPATSGSETPGTSESATPESGPGTSTEPSEGSAPGTSESATPESGPGSPAGSPTSTEEGSPAGSPTSTEEGSPAGSPTSTEEGTSESATPESGPGTSTEPSEGSAPGTSESATPESGPGSEPATSGSETPGTSESATPESGPGSEPATSGSETPGTSESATPESGPGTSTEPSEGSAPGSPAGSPTSTEEGTSESATPESGPGSEPATSGSETPGTSESATPESGPGSPAGSPTSTEEGSPAGSPTSTEEGTSTEPSEGSAPGTSESATPESGPGTSESATPESGPGTSESATPESGPGSEPATSGSETPGSEPATSGSETPGSPAGSPTSTEEGTSTEPSEGSAPGTSTEPSEGSAPGSEPATSGSETPGTSESATPESGPGTESASR

SEQ ID NO: 721 - protein, 712 aa, synthetic construct
  REGION 1..712: note = Description of Artificial Sequence: Synthetic polypeptide
PGSPAGSPTSTEEGTSESATPESGPGTSTEPSEGSAPGSPAGSPTSTEEGTSTEPSEGSAPGTSTEPSEGSAPGTSESATPESGPGSEPATSGSETPGSEPATSGSETPGSPAGSPTSTEEGTSESATPESGPGTSTEPSEGSAPGTSTEPSEGSAPGSPAGSPTSTEEGTSTEPSEGSAPGTSTEPSEGSAPGTSESATPESGPGTSTEPSEGSAPGTSESATPESGPGSEPATSGSETPGTSTEPSEGSAPGTSTEPSEGSAPGTSESATPESGPGTSESATPESGPGSPAGSPTSTEEGTSESATPESGPGSEPATSGSETPGTSESATPESGPGTSTEPSEGSAPGTSTEPSEGSAPGTSTEPSEGSAPGTSTEPSEGSAPGTSTEPSEGSAPGTSTEPSEGSAPGSPAGSPTSTEEGTSTEPSEGSAPGTSESATPESGPGSEPATSGSETPGTSESATPESGPGSEPATSGSETPGTSESATPESGPGTSTEPSEGSAPGTSESATPESGPGSPAGSPTSTEEGSPAGSPTSTEEGSPAGSPTSTEEGTSESATPESGPGTSTEPSEGSAPGTSESATPESGPGSEPATSGSETPGTSESATPESGPGSEPATSGSETPGTSESATPESGPGTSTEPSEGSAPGSPAGSPTSTEEGTSESATPESGPGSEPATSGSETPGTSESATPESGPGSPAGSPTSTEAHHH

SEQ ID NO: 722 - protein, 864 aa, synthetic construct
  REGION 1..864: note = Description of Artificial Sequence: Synthetic polypeptide
GSPGAGSPAGSPTSTEEGTSESATPESGPGTSTEPSEGSAPGSPAGSPTSTEEGTSTEPSEGSAPGTSTEPSEGSAPGTSESATPESGPGSEPATSGSETPGSEPATSGSETPGSPAGSPTSTEEGTSESATPESGPGTSTEPSEGSAPGTSTEPSEGSAPGSPAGSPTSTEEGTSTEPSEGSAPGTSTEPSEGSAPGTSESATPESGPGTSTEPSEGSAPGTSESATPESGPGSEPATSGSETPGTSTEPSEGSAPGTSTEPSEGSAPGTSESATPESGPGTSESATPESGPGSPAGSPTSTEEGTSESATPESGPGSEPATSGSETPGTSESATPESGPGTSTEPSEGSAPGTSTEPSEGSAPGTSTEPSEGSAPGTSTEPSEGSAPGTSTEPSEGSAPGTSTEPSEGSAPGSPAGSPTSTEEGTSTEPSEGSAPGTSESATPESGPGSEPATSGSETPGTSESATPESGPGSEPATSGSETPGTSESATPESGPGTSTEPSEGSAPGTSESATPESGPGSPAGSPTSTEEGSPAGSPTSTEEGSPAGSPTSTEEGTSESATPESGPGTSTEPSEGSAPGTSESATPESGPGSEPATSGSETPGTSESATPESGPGSEPATSGSETPGTSESATPESGPGTSTEPSEGSAPGSPAGSPTSTEEGTSESATPESGPGSEPATSGSETPGTSESATPESGPGSPAGSPTSTEEGSPAGSPTSTEEGTSTEPSEGSAPGTSESATPESGPGTSESATPESGPGTSESATPESGPGSEPATSGSETPGSEPATSGSETPGSPAGSPTSTEEGTSTEPSEGSAPGTSTEPSEGSAPGSEPATSGSETPGTSESATPESGPGTESASR

SEQ ID NO: 723 - protein, 288 aa, synthetic construct
  REGION 1..288: note = Description of Artificial Sequence: Synthetic polypeptide
SPAGSPTSTEEGTSESATPESGPGTSTEPSEGSAPGTSESATPESGPGSEPATSGSETPGTSESATPESGPGSEPATSGSETPGTSESATPESGPGTSTEPSEGSAPGSPAGSPTSTEEGTSESATPESGPGSEPATSGSETPGTSESATPESGPGSPAGSPTSTEEGSPAGSPTSTEEGTSTEPSEGSAPGTSESATPESGPGTSESATPESGPGTSESATPESGPGSEPATSGSETPGSEPATSGSETPGSPAGSPTSTEEGTSTEPSEGSAPGTSTEPSEGSAPG

SEQ ID NO: 724 - protein, 284 aa, synthetic construct
  REGION 1..284: note = Description of Artificial Sequence: Synthetic polypeptide
GTSESATPESGPGSEPATSGSETPGTSESATPESGPGSEPATSGSETPGTSESATPESGPGTSTEPSEGSAPGSPAGSPTSTEEGTSESATPESGPGSEPATSGSETPGTSESATPESGPGSPAGSPTSTEEGSPAGSPTSTEEGTSTEPSEGSAPGTSESATPESGPGTSESATPESGPGTSESATPESGPGSEPATSGSETPGSEPATSGSETPGSPAGSPTSTEEGTSTEPSEGSAPGTSTEPSEGSAPGSEPATSGSETPGTSESATPESGPGTSTEPSE

SEQ ID NO: 725 - protein, 292 aa, synthetic construct
  REGION 1..292: note = Description of Artificial Sequence: Synthetic polypeptide
SPAGSPTSTEEGTSESATPESGPGTSTEPSEGSAPGTSESATPESGPGSEPATSGSETPGTSESATPESGPGSEPATSGSETPGTSESATPESGPGTSTEPSEGSAPGSPAGSPTSTEEGTSESATPESGPGSEPATSGSETPGTSESATPESGPGSPAGSPTSTEEGSPAGSPTSTEEGTSTEPSEGSAPGTSESATPESGPGTSESATPESGPGTSESATPESGPGSEPATSGSETPGSEPATSGSETPGSPAGSPTSTEEGTSTEPSEGSAPGTSTEPSEGSAPGGSAP

SEQ ID NO: 726 - protein, 864 aa, synthetic construct
  REGION 1..864: note = Description of Artificial Sequence: Synthetic polypeptide
AGSPTSTEEGTSESATPESGPGTSTEPSEGSAPGSPAGSPTSTEEGTSTEPSEGSAPGTSTEPSEGSAPGTSESATPESGPGSEPATSGSETPGSEPATSGSETPGSPAGSPTSTEEGTSESATPESGPGTSTEPSEGSAPGTSTEPSEGSAPGSPAGSPTSTEEGTSTEPSEGSAPGTSTEPSEGSAPGTSESATPESGPGTSTEPSEGSAPGTSESATPESGPGSEPATSGSETPGTSTEPSEGSAPGTSTEPSEGSAPGTSESATPESGPGTSESATPESGPGSPAGSPTSTEEGTSESATPESGPGSEPATSGSETPGTSESATPESGPGTSTEPSEGSAPGTSTEPSEGSAPGTSTEPSEGSAPGTSTEPSEGSAPGTSTEPSEGSAPGTSTEPSEGSAPGSPAGSPTSTEEGTSTEPSEGSAPGTSESATPESGPGSEPATSGSETPGTSESATPESGPGSEPATSGSETPGTSESATPESGPGTSTEPSEGSAPGTSESATPESGPGSPAGSPTSTEEGSPAGSPTSTEEGSPAGSPTSTEEGTSESATPESGPGTSTEPSEGSAPGTSESATPESGPGSEPATSGSETPGTSESATPESGPGSEPATSGSETPGTSESATPESGPGTSTEPSEGSAPGSPAGSPTSTEEGTSESATPESGPGSEPATSGSETPGTSESATPESGPGSPAGSPTSTEEGSPAGSPTSTEEGTSTEPSEGSAPGTSESATPESGPGTSESATPESGPGTSESATPESGPGSEPATSGSETPGSEPATSGSETPGSPAGSPTSTEEGTSTEPSEGSAPGTSTEPSEGSAPGSEPATSGSETPGTSESATPESGPGTSTEPSEGAAEPEA

SEQ ID NO: 727 - protein, 867 aa, synthetic construct
  REGION 1..867: note = Description of Artificial Sequence: Synthetic polypeptide
GSPAGSPTSTEEGTSESATPESGPGTSTEPSEGSAPGSPAGSPTSTEEGTSTEPSEGSAPGTSTEPSEGSAPGTSESATPESGPGSEPATSGSETPGSEPATSGSETPGSPAGSPTSTEEGTSESATPESGPGTSTEPSEGSAPGTSTEPSEGSAPGSPAGSPTSTEEGTSTEPSEGSAPGTSTEPSEGSAPGTSESATPESGPGTSTEPSEGSAPGTSESATPESGPGSEPATSGSETPGTSTEPSEGSAPGTSTEPSEGSAPGTSESATPESGPGTSESATPESGPGSPAGSPTSTEEGTSESATPESGPGSEPATSGSETPGTSESATPESGPGTSTEPSEGSAPGTSTEPSEGSAPGTSTEPSEGSAPGTSTEPSEGSAPGTSTEPSEGSAPGTSTEPSEGSAPGSPAGSPTSTEEGTSTEPSEGSAPGTSESATPESGPGSEPATSGSETPGTSESATPESGPGSEPATSGSETPGTSESATPESGPGTSTEPSEGSAPGTSESATPESGPGSPAGSPTSTEEGSPAGSPTSTEEGSPAGSPTSTEEGTSESATPESGPGTSTEPSEGSAPGTSESATPESGPGSEPATSGSETPGTSESATPESGPGSEPATSGSETPGTSESATPESGPGTSTEPSEGSAPGSPAGSPTSTEEGTSESATPESGPGSEPATSGSETPGTSESATPESGPGSPAGSPTSTEEGSPAGSPTSTEEGTSTEPSEGSAPGTSESATPESGPGTSESATPESGPGTSESATPESGPGSEPATSGSETPGSEPATSGSETPGSPAGSPTSTEEGTSTEPSEGSAPGTSTEPSEGSAPGSEPATSGSETPGTSESATPESGPGTSTEPSEGAAEPEA

SEQ ID NO: 728 - protein, 867 aa, synthetic construct
  REGION 1..867: note = Description of Artificial Sequence: Synthetic polypeptide
SPGSPAGSPTSTEEGTSESATPESGPGTSTEPSEGSAPGSPAGSPTSTEEGTSTEPSEGSAPGTSTEPSEGSAPGTSESATPESGPGSEPATSGSETPGSEPATSGSETPGSPAGSPTSTEEGTSESATPESGPGTSTEPSEGSAPGTSTEPSEGSAPGSPAGSPTSTEEGTSTEPSEGSAPGTSTEPSEGSAPGTSESATPESGPGTSTEPSEGSAPGTSESATPESGPGSEPATSGSETPGTSTEPSEGSAPGTSTEPSEGSAPGTSESATPESGPGTSESATPESGPGSPAGSPTSTEEGTSESATPESGPGSEPATSGSETPGTSESATPESGPGTSTEPSEGSAPGTSTEPSEGSAPGTSTEPSEGSAPGTSTEPSEGSAPGTSTEPSEGSAPGTSTEPSEGSAPGSPAGSPTSTEEGTSTEPSEGSAPGTSESATPESGPGSEPATSGSETPGTSESATPESGPGSEPATSGSETPGTSESATPESGPGTSTEPSEGSAPGTSESATPESGPGSPAGSPTSTEEGSPAGSPTSTEEGSPAGSPTSTEEGTSESATPESGPGTSTEPSEGSAPGTSESATPESGPGSEPATSGSETPGTSESATPESGPGSEPATSGSETPGTSESATPESGPGTSTEPSEGSAPGSPAGSPTSTEEGTSESATPESGPGSEPATSGSETPGTSESATPESGPGSPAGSPTSTEEGSPAGSPTSTEEGTSTEPSEGSAPGTSESATPESGPGTSESATPESGPGTSESATPESGPGSEPATSGSETPGSEPATSGSETPGSPAGSPTSTEEGTSTEPSEGSAPGTSTEPSEGSAPGSEPATSGSETPGTSESATPESGPGTSTEPSEGSAPG

SEQ ID NO: 729 - protein, 868 aa, synthetic construct
  REGION 1..868: note = Description of Artificial Sequence: Synthetic polypeptide
PGSPAGSPTSTEEGTSESATPESGPGTSTEPSEGSAPGSPAGSPTSTEEGTSTEPSEGSAPGTSTEPSEGSAPGTSESATPESGPGSEPATSGSETPGSEPATSGSETPGSPAGSPTSTEEGTSESATPESGPGTSTEPSEGSAPGTSTEPSEGSAPGSPAGSPTSTEEGTSTEPSEGSAPGTSTEPSEGSAPGTSESATPESGPGTSTEPSEGSAPGTSESATPESGPGSEPATSGSETPGTSTEPSEGSAPGTSTEPSEGSAPGTSESATPESGPGTSESATPESGPGSPAGSPTSTEEGTSESATPESGPGSEPATSGSETPGTSESATPESGPGTSTEPSEGSAPGTSTEPSEGSAPGTSTEPSEGSAPGTSTEPSEGSAPGTSTEPSEGSAPGTSTEPSEGSAPGSPAGSPTSTEEGTSTEPSEGSAPGTSESATPESGPGSEPATSGSETPGTSESATPESGPGSEPATSGSETPGTSESATPESGPGTSTEPSEGSAPGTSESATPESGPGSPAGSPTSTEEGSPAGSPTSTEEGSPAGSPTSTEEGTSESATPESGPGTSTEPSEGSAPGTSESATPESGPGSEPATSGSETPGTSESATPESGPGSEPATSGSETPGTSESATPESGPGTSTEPSEGSAPGSPAGSPTSTEEGTSESATPESGPGSEPATSGSETPGTSESATPESGPGSPAGSPTSTEEGSPAGSPTSTEEGTSTEPSEGSAPGTSESATPESGPGTSESATPESGPGTSESATPESGPGSEPATSGSETPGSEPATSGSETPGSPAGSPTSTEEGTSTEPSEGSAPGTSTEPSEGSAPGSEPATSGSETPGTSESATPESGPGTSTEPSEGAAEPEA

SEQ ID NO: 730 - protein, 144 aa, synthetic construct
  REGION 1..144: note = Description of Artificial Sequence: Synthetic polypeptide
GSPAGSPTSTEEGTSESATPESGPGTSTEPSEGSAPGSPAGSPTSTEEGTSTEPSEGSAPGTSTEPSEGSAPGTSESATPESGPGSEPATSGSETPGSEPATSGSETPGSPAGSPTSTEEGTSESATPESGPGTSTEPSEGSAP

SEQ ID NO: 731 - protein, 292 aa, synthetic construct; identical to SEQ ID NO: 725
  REGION 1..292: note = Description of Artificial Sequence: Synthetic polypeptide

SEQ ID NO: 732 - protein, 584 aa, synthetic construct
  REGION 1..584: note = Description of Artificial Sequence: Synthetic polypeptide
PGSPAGSPTSTEEGTSESATPESGPGTSTEPSEGSAPGSPAGSPTSTEEGTSTEPSEGSAPGTSTEPSEGSAPGTSESATPESGPGSEPATSGSETPGSEPATSGSETPGSPAGSPTSTEEGTSESATPESGPGTSTEPSEGSAPGTSTEPSEGSAPGSPAGSPTSTEEGTSTEPSEGSAPGTSTEPSEGSAPGTSESATPESGPGTSTEPSEGSAPGTSESATPESGPGSEPATSGSETPGTSTEPSEGSAPGTSTEPSEGSAPGTSESATPESGPGTSESATPESGPGSPAGSPTSTEEGTSESATPESGPGSEPATSGSETPGTSESATPESGPGTSTEPSEGSAPGTSTEPSEGSAPGTSTEPSEGSAPGTSTEPSEGSAPGTSTEPSEGSAPGTSTEPSEGSAPGSPAGSPTSTEEGTSTEPSEGSAPGTSESATPESGPGSEPATSGSETPGTSESATPESGPGSEPATSGSETPGTSESATPESGPGTSTEPSEGSAPGTSESATPESGPGSPAGSPTSTEEGSPAGSPTSTEEGSPAGSPTSTEEGTSESATPESGPGTSTEPSEGSAPGAAEPEA

SEQ ID NO: 733 - protein, 300 aa, synthetic construct
  REGION 1..300: note = Description of Artificial Sequence: Synthetic polypeptide
PGSPAGSPTSTEEGTSESATPESGPGTSTEPSEGSAPGSPAGSPTSTEEGTSTEPSEGSAPGTSTEPSEGSAPGTSESATPESGPGSEPATSGSETPGSEPATSGSETPGSPAGSPTSTEEGTSESATPESGPGTSTEPSEGSAPGTSTEPSEGSAPGSPAGSPTSTEEGTSTEPSEGSAPGTSTEPSEGSAPGTSESATPESGPGTSTEPSEGSAPGTSESATPESGPGSEPATSGSETPGTSTEPSEGSAPGTSTEPSEGSAPGTSESATPESGPGTSESATPESGPGSPAGAAEPEA

SEQ ID NO: 734 - protein, 584 aa, synthetic construct; identical to SEQ ID NO: 732
  REGION 1..584: note = Description of Artificial Sequence: Synthetic polypeptide

SEQ ID NO: 735 - protein, 14 aa, synthetic construct
  REGION 1..14: note = Description of Artificial Sequence: Synthetic peptide
RSSNGAVTSSNYAN

SEQ ID NO: 736 - protein, 14 aa, synthetic construct
  REGION 1..14: note = Description of Artificial Sequence: Synthetic peptide
RSSNGEVTTSNYAN

SEQ ID NO: 737 - protein, 14 aa, synthetic construct
  REGION 1..14: note = Description of Artificial Sequence: Synthetic peptide
RSSTGAVTTSNYAN

SEQ ID NO: 738 - protein, 7 aa, synthetic construct
  REGION 1..7: note = Description of Artificial Sequence: Synthetic peptide
GTNKRAP

SEQ ID NO: 739 - protein, 7 aa, synthetic construct
  REGION 1..7: note = Description of Artificial Sequence: Synthetic peptide
GTIKRAP

SEQ ID NO: 740 - protein, 10 aa, synthetic construct
  REGION 1..10: note = Description of Artificial Sequence: Synthetic peptide
ALWYPNLWVF

SEQ ID NO: 741 - protein, 10 aa, synthetic construct
  REGION 1..10: note = Description of Artificial Sequence: Synthetic peptide
ALWYSNLWVF

SEQ ID NO: 742 - protein, 10 aa, synthetic construct
  REGION 1..10: note = Description of Artificial Sequence: Synthetic peptide
GFTFNTYAMN

SEQ ID NO: 743 - protein, 19 aa, synthetic construct
  REGION 1..19: note = Description of Artificial Sequence: Synthetic peptide
RIRSKYNNYATYYADSVKD

SEQ ID NO: 744 - protein, 14 aa, synthetic construct
  REGION 1..14: note = Description of Artificial Sequence: Synthetic peptide
HENFGNSYVSWFAH

SEQ ID NO: 745 - protein, 14 aa, synthetic construct
  REGION 1..14: note = Description of Artificial Sequence: Synthetic peptide
HGNFGNSYVSWFAY

SEQ ID NO: 746 - protein, 22 aa, synthetic construct
  REGION 1..22: note = Description of Artificial Sequence: Synthetic peptide
ELVVTQEPSLTVSPGGTVTLTC

SEQ ID NO: 747 - protein, 15 aa, synthetic construct
  REGION 1..15: note = Description of Artificial Sequence: Synthetic peptide
WVQQKPGQAPRGLIG

SEQ ID NO: 748 - protein, 32 aa, synthetic construct
  REGION 1..32: note = Description of Artificial Sequence: Synthetic polypeptide
GTPARFSGSLLGGKAALTLSGVQPEDEAVYYC

SEQ ID NO: 749 - protein, 32 aa, synthetic construct
  REGION 1..32: note = Description of Artificial Sequence: Synthetic polypeptide
GTPARFSGSSLGGKAALTLSGVQPEDEAVYYC

SEQ ID NO: 750 - protein, 32 aa, synthetic construct
  REGION 1..32: note = Description of Artificial Sequence: Synthetic polypeptide
GTPARFSGSLLGGSAALTLSGVQPEDEAVYYC

SEQ ID NO: 751 - protein, 32 aa, synthetic construct
  REGION 1..32: note = Description of Artificial Sequence: Synthetic polypeptide
GTPARFSGSSLGGSAALTLSGVQPEDEAVYYC

SEQ ID NO: 752 - protein, 32 aa, synthetic construct
  REGION 1..32: note = Description of Artificial Sequence: Synthetic polypeptide
GTPARFSGSLLGGKAALTLSGVQPEDEAEYYC

SEQ ID NO: 753 - protein, 32 aa, synthetic construct
  REGION 1..32: note = Description of Artificial Sequence: Synthetic polypeptide
GTPARFSGSSLGGSAALTLSGVQPEDEAEYYC

SEQ ID NO: 754 - protein, 9 aa, synthetic construct
  REGION 1..9: note = Description of Artificial Sequence: Synthetic peptide
GGGTKLTVL

SEQ ID NO: 755 - protein, 25 aa, synthetic construct
  REGION 1..25: note = Description of Artificial Sequence: Synthetic peptide
EVQLLESGGGIVQPGGSLKLSCAAS

SEQ ID NO: 756 - protein, 25 aa, synthetic construct
  REGION 1..25: note = Description of Artificial Sequence: Synthetic peptide
EVQLQESGGGIVQPGGSLKLSCAAS

SEQ ID NO: 757 - protein, 25 aa, synthetic construct
  REGION 1..25: note = Description of Artificial Sequence: Synthetic peptide
EVQLQESGGGLVQPGGSLKLSCAAS

SEQ ID NO: 758 - protein, 25 aa, synthetic construct
  REGION 1..25: note = Description of Artificial Sequence: Synthetic peptide
EVQLLESGGGLVQPGGSLKLSCAAS

SEQ ID NO: 759 - protein, 14 aa, synthetic construct
  REGION 1..14: note = Description of Artificial Sequence: Synthetic peptide
WVRQAPGKGLEWVA

SEQ ID NO: 760 - protein, 32 aa, synthetic construct
  REGION 1..32: note = Description of Artificial Sequence: Synthetic polypeptide
RFTISRDDSKNTVYLQMNNLKTEDTAVYYCVR

SEQ ID NO: 761 - skipped

SEQ ID NO: 762 - protein, 32 aa, synthetic construct
  REGION 1..32: note = Description of Artificial Sequence: Synthetic polypeptide
RFTISRDDSKNTAYLQMNNLKTEDTAVYYCVR

SEQ ID NO: 763 - skipped

SEQ ID NO: 764 - protein, 11 aa, synthetic construct
  REGION 1..11: note = Description of Artificial Sequence: Synthetic peptide
WGQGTLVTVSS

SEQ ID NO: 765 - protein, 109 aa, synthetic construct
  REGION 1..109: note = Description of Artificial Sequence: Synthetic polypeptide
ELVVTQEPSLTVSPGGTVTLTCRSSNGAVTSSNYANWVQQKPGQAPRGLIGGTNKRAPGTPARFSGSLLGGKAALTLSGVQPEDEAVYYCALWYPNLWVFGGGTKLTVL

SEQ ID NO: 766 - protein, 125 aa, synthetic construct
  REGION 1..125: note = Description of Artificial Sequence: Synthetic polypeptide
EVQLLESGGGIVQPGGSLKLSCAASGFTFNTYAMNWVRQAPGKGLEWVARIRSKYNNYATYYADSVKDRFTISRDDSKNTVYLQMNNLKTEDTAVYYCVRHENFGNSYVSWFAHWGQGTLVTVSS

SEQ ID NO: 767 - protein, 109 aa, synthetic construct
  REGION 1..109: note = Description of Artificial Sequence: Synthetic polypeptide
ELVVTQEPSLTVSPGGTVTLTCRSSNGEVTTSNYANWVQQKPGQAPRGLIGGTIKRAPGTPARFSGSLLGGKAALTLSGVQPEDEAVYYCALWYPNLWVFGGGTKLTVL

SEQ ID NO: 768 - protein, 109 aa, synthetic construct
  REGION 1..109: note = Description of Artificial Sequence: Synthetic polypeptide
ELVVTQEPSLTVSPGGTVTLTCRSSNGAVTSSNYANWVQQKPGQAPRGLIGGTNKRAPGTPARFSGSSLGGKAALTLSGVQPEDEAVYYCALWYPNLWVFGGGTKLTVL

SEQ ID NO: 769 - protein, 125 aa, synthetic construct
  REGION 1..125: note = Description of Artificial Sequence: Synthetic polypeptide
EVQLQESGGGIVQPGGSLKLSCAASGFTFNTYAMNWVRQAPGKGLEWVARIRSKYNNYATYYADSVKDRFTISRDDSKNTVYLQMNNLKTEDTAVYYCVRHENFGNSYVSWFAHWGQGTLVTVSS

SEQ ID NO: 770 - protein, 109 aa, synthetic construct
  REGION 1..109: note = Description of Artificial Sequence: Synthetic polypeptide
ELVVTQEPSLTVSPGGTVTLTCRSSNGAVTSSNYANWVQQKPGQAPRGLIGGTNKRAPGTPARFSGSLLGGSAALTLSGVQPEDEAVYYCALWYPNLWVFGGGTKLTVL

SEQ ID NO: 771 - protein, 109 aa, synthetic construct
  REGION 1..109: note = Description of Artificial Sequence: Synthetic polypeptide
ELVVTQEPSLTVSPGGTVTLTCRSSNGAVTSSNYANWVQQKPGQAPRGLIGGTNKRAPGTPARFSGSSLGGSAALTLSGVQPEDEAVYYCALWYPNLWVFGGGTKLTVL

SEQ ID NO: 772 - protein, 109 aa, synthetic construct
  REGION 1..109: note = Description of Artificial Sequence: Synthetic polypeptide
ELVVTQEPSLTVSPGGTVTLTCRSSTGAVTTSNYANWVQQKPGQAPRGLIGGTNKRAPGTPARFSGSLLGGKAALTLSGVQPEDEAEYYCALWYSNLWVFGGGTKLTVL

SEQ ID NO: 773 - protein, 125 aa, synthetic construct
  REGION 1..125: note = Description of Artificial Sequence: Synthetic polypeptide
EVQLLESGGGLVQPGGSLKLSCAASGFTFNTYAMNWVRQAPGKGLEWVARIRSKYNNYATYYADSVKDRFTISRDDSKNTAYLQMNNLKTEDTAVYYCVRHGNFGNSYVSWFAYWGQGTLVTVSS

SEQ ID NO: 774 - protein, 109 aa, synthetic construct
  REGION 1..109: note = Description of Artificial Sequence: Synthetic polypeptide
ELVVTQEPSLTVSPGGTVTLTCRSSTGAVTTSNYANWVQQKPGQAPRGLIGGTNKRAPGTPARFSGSSLGGSAALTLSGVQPEDEAEYYCALWYSNLWVFGGGTKLTVL

SEQ ID NO: 775 - protein, 125 aa, synthetic construct
  REGION 1..125: note = Description of Artificial Sequence: Synthetic polypeptide
EVQLQESGGGLVQPGGSLKLSCAASGFTFNTYAMNWVRQAPGKGLEWVARIRSKYNNYATYYADSVKDRFTISRDDSKNTAYLQMNNLKTEDTAVYYCVRHGNFGNSYVSWFAYWGQGTLVTVSS

SEQ ID NO: 776 - protein, 264 aa, synthetic construct
  REGION 1..264: note = Description of Artificial Sequence: Synthetic polypeptide
ELVVTQEPSLTVSPGGTVTLTCRSSNGAVTSSNYANWVQQKPGQAPRGLIGGTNKRAPGTPARFSGSLLGGKAALTLSGVQPEDEAVYYCALWYPNLWVFGGGTKLTVLGATPPETGAETESPGETTGGSAESEPPGEGEVQLLESGGGIVQPGGSLKLSCAASGFTFNTYAMNWVRQAPGKGLEWVARIRSKYNNYATYYADSVKDRFTISRDDSKNTVYLQMNNLKTEDTAVYYCVRHENFGNSYVSWFAHWGQGTLVTVSS

SEQ ID NO: 777 - protein, 264 aa, synthetic construct
  REGION 1..264: note = Description of Artificial Sequence: Synthetic polypeptide
ELVVTQEPSLTVSPGGTVTLTCRSSNGEVTTSNYANWVQQKPGQAPRGLIGGTIKRAPGTPARFSGSLLGGKAALTLSGVQPEDEAVYYCALWYPNLWVFGGGTKLTVLGATPPETGAETESPGETTGGSAESEPPGEGEVQLLESGGGIVQPGGSLKLSCAASGFTFNTYAMNWVRQAPGKGLEWVARIRSKYNNYATYYADSVKDRFTISRDDSKNTVYLQMNNLKTEDTAVYYCVRHENFGNSYVSWFAHWGQGTLVTVSS

SEQ ID NO: 778 - protein, 264 aa, synthetic construct
  REGION 1..264: note = Description of Artificial Sequence: Synthetic polypeptide
ELVVTQEPSLTVSPGGTVTLTCRSSNGAVTSSNYANWVQQKPGQAPRGLIGGTNKRAPGTPARFSGSSLGGKAALTLSGVQPEDEAVYYCALWYPNLWVFGGGTKLTVLGATPPETGAETESPGETTGGSAESEPPGEGEVQLQESGGGIVQPGGSLKLSCAASGFTFNTYAMNWVRQAPGKGLEWVARIRSKYNNYATYYADSVKDRFTISRDDSKNTVYLQMNNLKTEDTAVYYCVRHENFGNSYVSWFAHWGQGTLVTVSS

SEQ ID NO: 779 - protein, 264 aa, synthetic construct
  REGION 1..264: note = Description of Artificial Sequence: Synthetic polypeptide
ELVVTQEPSLTVSPGGTVTLTCRSSNGAVTSSNYANWVQQKPGQAPRGLIGGTNKRAPGTPARFSGSLLGGSAALTLSGVQPEDEAVYYCALWYPNLWVFGGGTKLTVLGATPPETGAETESPGETTGGSAESEPPGEGEVQLQESGGGIVQPGGSLKLSCAASGFTFNTYAMNWVRQAPGKGLEWVARIRSKYNNYATYYADSVKDRFTISRDDSKNTVYLQMNNLKTEDTAVYYCVRHENFGNSYVSWFAHWGQGTLVTVSS

SEQ ID NO: 780 - protein, 264 aa, synthetic construct
  REGION 1..264: note = Description of Artificial Sequence: Synthetic polypeptide
ELVVTQEPSLTVSPGGTVTLTCRSSNGAVTSSNYANWVQQKPGQAPRGLIGGTNKRAPGTPARFSGSSLGGSAALTLSGVQPEDEAVYYCALWYPNLWVFGGGTKLTVLGATPPETGAETESPGETTGGSAESEPPGEGEVQLQESGGGIVQPGGSLKLSCAASGFTFNTYAMNWVRQAPGKGLEWVARIRSKYNNYATYYADSVKDRFTISRDDSKNTVYLQMNNLKTEDTAVYYCVRHENFGNSYVSWFAHWGQGTLVTVSS

SEQ ID NO: 781 - protein, 264 aa, synthetic construct
  REGION 1..264: note = Description of Artificial Sequence: Synthetic polypeptide
ELVVTQEPSLTVSPGGTVTLTCRSSTGAVTTSNYANWVQQKPGQAPRGLIGGTNKRAPGTPARFSGSLLGGKAALTLSGVQPEDEAEYYCALWYSNLWVFGGGTKLTVLGATPPETGAETESPGETTGGSAESEPPGEGEVQLLESGGGLVQPGGSLKLSCAASGFTFNTYAMNWVRQAPGKGLEWVARIRSKYNNYATYYADSVKDRFTISRDDSKNTAYLQMNNLKTEDTAVYYCVRHGNFGNSYVSWFAYWGQGTLVTVSS

SEQ ID NO: 782 - protein, 264 aa, synthetic construct
  REGION 1..264: note = Description of Artificial Sequence: Synthetic polypeptide
ELVVTQEPSLTVSPGGTVTLTCRSSTGAVTTSNYANWVQQKPGQAPRGLIGGTNKRAPGTPARFSGSSLGGSAALTLSGVQPEDEAEYYCALWYSNLWVFGGGTKLTVLGATPPETGAETESPGETTGGSAESEPPGEGEVQLQESGGGLVQPGGSLKLSCAASGFTFNTYAMNWVRQAPGKGLEWVARIRSKYNNYATYYADSVKDRFTISRDDSKNTAYLQMNNLKTEDTAVYYCVRHGNFGNSYVSWFAYWGQGTLVTVSS

SEQ ID NO: 783 - protein, 256 aa, synthetic construct
  REGION 1..256: note = Description of Artificial Sequence: Synthetic polypeptide
QSVLTQPPSASGTPGQRVTISCSGSSSNIGSNYVYWYQQLPGTAPKLLIYRNNQRPSGVPDRFSGSKSGTSASLAISGLRSEDEADYYCAAWDDSLSGLWVFGGGTKLTVLGATPPETGAETESPGETTGGSAESEPPGEGQVQLQQWGGGLVKPGGSLRLSCAASGFTFSSYSMNWVRQAPGKGLEWVSRINSDGSSTNYADSVKGRFTISRDNAKNTLYLQMNSLRAEDTAVYYCARELRWGNWGQGTLVTVSS

SEQ ID NO: 784 - protein, 255 aa, synthetic construct
  REGION 1..255: note = Description of Artificial Sequence: Synthetic polypeptide
QAGLTQPPSASGTPGQRVTLSCSGSYSNIGTYYVYWYQQLPGTAPKLLIYSNDQRLSGVPDRFSGSKSGTSASLAISGLQSEDEAAYYCAAWDDSLNGWAFGGGTKLTVLGATPPETGAETESPGETTGGSAESEPPGEGQVQLQQWGGGLVKPGGSLRLSCAASGFTFSSYSMNWVRQAPGKGLEWVSRINSDGSSTNYADSVKGRFTISRDNAKNTLYLQMNSLRAEDTAVYYCARELRWGNWGQGTLVTVSS

SEQ ID NO: 785 - protein, 255 aa, synthetic construct
  REGION 1..255: note = Description of Artificial Sequence: Synthetic polypeptide
QPGLTQPPSASGTPGQRVTLSCSGRSSNIGSYYVYWYQHLPGMAPKLLIYRNSRRPSGVPDRFSGSKSGTSASLVISGLQSDDEADYYCAAWDDSLKSWVFGGGTKLTVLGATPPETGAETESPGETTGGSAESEPPGEGQVQLQQWGGGLVKPGGSLRLSCAASGFTFSSYSMNWVRQAPGKGLEWVSRINSDGSSTNYADSVKGRFTISRDNAKNTLYLQMNSLRAEDTAVYYCARELRWGNWGQGTLVTVSS

SEQ ID NO: 786 - protein, 255 aa, synthetic construct
  REGION 1..255: note = Description of Artificial Sequence: Synthetic polypeptide
QSVLTQPPSASGTPGQRVTISCSGSSSNIGTNYVYWYQQFPGTAPKLLIYSNNQRPSGVPDRFSGSKSGTSGSLAISGLQSEDEADYSCAAWDDSLNGWVFGGGTKLTVLGATPPETGAETESPGETTGGSAESEPPGEGQVQLVQWGGGLVKPGGSLRLSCAASGFTFSSYSMNWVRQAPGKGLEWVSRINSDGSSTNYADSVKGRFTISRDNAKNTLYLQMNSLRAEDTAVYYCARELRWGNWGQGTLVTVSS

SEQ ID NO: 787 - protein, 255 aa, synthetic construct
  REGION 1..255: note = Description of Artificial Sequence: Synthetic polypeptide
QPGLTQPPSASGTPGQRVTISCSGSSSNIGSNYVYWYQQLPGTAPKLLIYRNNQRPSGVPDRLSGSKSGTSASLAISGLRSEDEADYYCAAWDDSLSGWVFGGGTKLTVLGATPPETGAETESPGETTGGSAESEPPGEGQVQLVQWGGGLVKPGGSLRLSCAASGFTFSSYSMNWVRQAPGKGLEWVSRINSDGSSTNYADSVKGRFTISRDNAKNTLYLQMNSLRAEDTAVYYCARELRWGNWGQGTLVTVSS

SEQ ID NO: 788 - protein, 256 aa, synthetic construct
  REGION 1..256: note = Description of Artificial Sequence: Synthetic polypeptide
QAVLTQPPSASGTPGQRVTISCSGSSSNIGSYYVYWYQQVPGAAPKLLMRLNNQRPSGVPDRFSGAKSGTSASLVISGLRSEDEADYYCAAWDDSLSGQWVFGGGTKLTVLGATPPETGAETESPGETTGGSAESEPPGEGQVQLQQWGGGLVKPGGSLRLSCAASGFTFSSYSMNWVRQAPGKGLEWVSRINSDGSSTNYADSVKGRFTISRDNAKNTLYLQMNSLRAEDTAVYYCARELRWGNWGQGTLVTVSS

SEQ ID NO: 789 - protein, 255 aa, synthetic construct
  REGION 1..255: note = Description of Artificial Sequence: Synthetic polypeptide
QAGLTQPPSASGTPGQRVTISCSGSSSNIGSNYVYWYQQLPGTAPKLLIYRNNQRPSGVPDRFSGSKSGTSASLAISGLRSEDEADYYCATWDASLSGWVFGGGTKLTVLGATPPETGAETESPGETTGGSAESEPPGEGEVQLVQWGGGLVKPGGSLRLSCAASGFTFSSYSMNWVRQAPGKGLEWVSRINSDGSSTNYADSVKGRFTISRDNAKNTLYLQMNSLRAEDTAVYYCARELRWGNWGQGTLVTVSS

SEQ ID NO: 790-1714 - skipped (925 entries)

SEQ ID NO: 1715 - protein, 12 aa, synthetic construct
  REGION 1..12: note = Description of Artificial Sequence: Synthetic peptide
GSGASEPTSTEP

SEQ ID NO: 1716 - protein, 12 aa, synthetic construct
  REGION 1..12: note = Description of Artificial Sequence: Synthetic peptide
GSEPATSGTEPS

SEQ ID NO: 1717 - protein, 12 aa, synthetic construct
  REGION 1..12: note = Description of Artificial Sequence: Synthetic peptide
GTSEPSTSEPGA

SEQ ID NO: 1718 - protein, 12 aa, synthetic construct
  REGION 1..12: note = Description of Artificial Sequence: Synthetic peptide
GTSTEPSEPGSA

SEQ ID NO: 1719 - protein, 12 aa, synthetic construct
  REGION 1..12: note = Description of Artificial Sequence: Synthetic peptide
GSTAGSETSTEA

SEQ ID NO: 1720 - protein, 12 aa, synthetic construct
  REGION 1..12: note = Description of Artificial Sequence: Synthetic peptide
GSETATSGSETA

SEQ ID NO: 1721 - protein, 12 aa, synthetic construct
  REGION 1..12: note = Description of Artificial Sequence: Synthetic peptide
GTSESATSESGA

SEQ ID NO: 1722 - protein, 12 aa, synthetic construct
  REGION 1..12: note = Description of Artificial Sequence: Synthetic peptide
GTSTEASEGSAS

SEQ ID NO: 1723 - protein, 177 aa, Homo sapiens; identical to SEQ ID NO: 270

SEQ ID NO: 1724 - protein, 175 aa, Canis lupus; identical to SEQ ID NO: 271

SEQ ID NO: 1725 - protein, 176 aa, Oryctolagus cuniculus; identical to SEQ ID NO: 272

SEQ ID NO: 1726 - protein, 178 aa, Rattus norvegicus; identical to SEQ ID NO: 273

SEQ ID NO: 1727 - protein, 178 aa, Mus musculus; identical to SEQ ID NO: 274

SEQ ID NO: 1728 - protein, 153 aa, synthetic construct; identical to SEQ ID NO: 275
  REGION 1..153: note = Description of Artificial Sequence: Synthetic polypeptide

SEQ ID NO: 1729 - protein, 28 aa, unidentified
  REGION 1..28: note = Description of Unknown: a-natriuretic peptide (ANP)
SLRRSSCFGGRMDRIGAQSGLGCNSFRY

SEQ ID NO: 1730 - protein, 32 aa, Homo sapiens
SPKMVQGSGGFGRKMDRISSSSGLGCKVLRRH

SEQ ID NO: 1731 - protein, 32 aa, Rattus norvegicus
NSKMAHSSSCFGQKIDRIGAVSRLGCDGLRLF

SEQ ID NO: 1732 - protein, 22 aa, Sus scrofa
GLSKGCFGLKLDRIGSMSGLGC

SEQ ID NO: 1733 - protein, 146 aa, unidentified
  REGION 1..146: note = Description of Unknown: Fibroblast growth factor 2 (FGF-2) sequence
PALPEDGGSGAFPPGHFKDPKRLYCKNGGFFLRIHPDGRVDGVREKSDPHIKLQLQAEERGVVSIKGVCANRYLAMKEDGRLLASKCVTDECFFFERLESNNYNTYRSRKYTSWYVALKRTGQYKLGSKTGPGQKAILFLPMSAKS

SEQ ID NO: 1734 - protein, 235 aa, unidentified
  REGION 1..235: note = Description of Unknown: TNF receptor (TNFR) sequence
LPAQVAFTPYAPEPGSTCRLREYYDQTAQMCCSKCSPGQHAKVFCTKTSDTVCDSCEDSTYTQLWNWVPECLSCGSRCSSDQVETQACTREQNRICTCRPGWYCALSKQEGCRLCAPLRKCRPGFGVARPGTETSDVVCKPCAPGTFSNTTSSTDICRPHQICNVVAIPGNASMDAVCTSTSPTRSMAPGAVHLPQPVSTRSQHTQPTPEPSTAPSTSFLLPMGPSPPAEGSTGD

SEQ ID NO: 1735 - protein, 461 aa, unidentified
  REGION 1..461: note = Description of Unknown: FIX precursor sequence
MQRVNMIMAESPGLITICLLGYLLSAECTVFLDHENANKILNRPKRYNSGKLEEFVQGNLERECMEEKCSFEEAREVFENTERTTEFWKQYVDGDQCESNPCLNGGSCKDDINSYECWCPFGFEGKNCELDVTCNIKNGRCEQFCKNSADNKVVCSCTEGYRLAENQKSCEPAVPFPCGRVSVSQTSKLTRAETVFPDVDYVNSTEAETILDNITQSTQSFNDFTRVVGGEDAKPGQFPWQVVLNGKVDAFCGGSIVNEKWIVTAAHCVETGVKITVVAGEHNIEETEHTEQKRNVIRIIPHHNYNAAINKYNHDIALLELDEPLVLNSYVTPICIADKEYTNIFLKFGSGYVSGWGRVFHKGRSALVLQYLRVPLVDRATCLRSTKFTIYNNMFCAGFHEGGRDSCQGDSGGPHVTEVEGTSFLTGIISWGEECAMKGKYGIYTKVSRYVNWIKEKTKLT

SEQ ID NO: 1736 - protein, 415 aa, Homo sapiens
YNSGKLEEFVQGNLERECMEEKCSFEEAREVFENTERTTEFWKQYVDGDQCESNPCLNGGSCKDDINSYECWCPFGFEGKNCELDVTCNIKNGRCEQFCKNSADNKVVCSCTEGYRLAENQKSCEPAVPFPCGRVSVSQTSKLTRAETVFPDVDYVNSTEAETILDNITQSTQSFNDFTRVVGGEDAKPGQFPWQVVLNGKVDAFCGGSIVNEKWIVTAAHCVETGVKITVVAGEHNIEETEHTEQKRNVIRIIPHHNYNAAINKYNHDIALLELDEPLVLNSYVTPICIADKEYTNIFLKFGSGYVSGWGRVFHKGRSALVLQYLRVPLVDRATCLRSTKFTIYNNMFCAGFHEGGRDSCQGDSGGPHVTEVEGTSFLTGIISWGEECAMKGKYGIYTKVSRYVNWIKEKTKLT

SEQ ID NO: 1737 - protein, 460 aa, synthetic construct
  REGION 1..460: note = Description of Artificial Sequence: Synthetic polypeptide
MQRVNMIMAESPGLITICLLGYLLSAECTVFLDHENANKILNRPKRYNSGKLEEFVQGNLERECMEEKCSFEEAREVFENTERTTEFWKQYVDGDQCESNPCLNGGSCKDDINSYECWCPFGFEGKNCELDVTCNIKNGRCEQFCKNSADNKVVCSCTEGYRLAENQKSCEPAVPFPCGRVSVSQTSKLTRAEAVFPDVDYVNSTEAETILDNITQSTQSFNDFTRVVGGEDAKPGQFPWQVVLNGKVDAFCGGSIVNEKWIVTAAHCVETGVKITVVAGEHNIEETEHTEQKRNVIRIIPHHNFNAAINTYNHDIALLELDEPLVNSYVTPICIADKEYTNIFLKFGSGYVSGWGRVFHKGRSALVLQYLRVPLVDRATCLRSTKFTIYNNMFCAGFHEGGRDSCQGDSGGPHVTEVEGTSFLTGIISWGEECAMKGKYGIYTKVSRYVNWIKEKTKLT

SEQ ID NO: 1738 - protein, 460 aa, synthetic construct
  REGION 1..460: note = Description of Artificial Sequence: Synthetic polypeptide
MQRVNMIMAESPGLITICLLGYLLSAECTVFLDHENANKILNRPKRYNSGKLEEFVQGNLERECMEEKCSFEEAREVFENTERTTEFWKQYVDGDQCESNPCLNGGSCKDDINSYECWCPFGFEGKNCELDVTCNIKNGRCEQFCKNSADNKVVCSCTEGYRLAENQKSCEPAVPFPCGRVSVSQTSKLTRAEAVFPDVDYVNSTEAETILDNITQSTQSFNDFTRVVGGEDAKPGQFPWQVVLNGKVDAFCGGSIVNEKWIVTAAHCVETGVKITVVAGEHNIEETEHTEQKRNVIRIIPHHNFNAAINTYNHDIALLELDEPLVNSYVTPICIADKEYTNIFLKFGSGYVSGWGRVFHKGRSALVLQYLRVPLVDRATCLRSTKFTIFNNMFCAGFHEGGRDSCQGDSGGPHVTEVEGTSFLTGIISWGEECAMKGKYGIYTKVSRYVNWIKEKTKLT

SEQ ID NO: 1739 - protein, 460 aa, synthetic construct
  REGION 1..460: note = Description of Artificial Sequence: Synthetic polypeptide
MQRVNMIMAESPGLITICLLGYLLSAECTVFLDHENANKILNRPKRYNSGKLEEFVQGNLERECMEEKCSFEEAREVFENTERTTEFWKQYVDGDQCESNPCLNGGSCKDDINSYECWCPFGFEGKNCELDVTCNIKNGRCEQFCKNSADNKVVCSCTEGYRLAENQKSCEPAVPFPCGRVSVSQTSKLTRAEAVFPDVDYVNSTEAETILDNITQSTQSFNDFTRVVGGEDAKPGQFPWQVVLNGKVDAFCGGSIVNEKWIVTAAHCVETGVKITVVAGEHNIEETEHTEQKRNVIRIIPHHNFNAAINTYNHDIALLELDEPLVLNSYVTPICIADKEYTNIFLKFGSGYVSGWGRVFHKGRSALVLQYLRVPLVDATCLRSTKFTIFNNMFCAGFHEGGRDSCQGDSGGPHVTEVEGTSFLTGIVSWGEGCAMKGKYGIYTKVSRYVNWIKEKTKLT

SEQ ID NO: 1740 - protein, 462 aa, Homo sapiens
MQRVNMIMAESPSLITICLLGYLLSAECTVFLDHENANKILNRPKRYNSGKLEEFVQGNLERECMEEKCSFEEPREVFENTEKITEFWKQYVDGDQCESNPCLNGGSCKDDINSYECWCPFGFEGKNCELDVTCNIKNGRCEQFCKNSADNKVVCSCTEGYRLAENQKSCEPAVPFPCGRVSVSQTSKLTRAEAVFPDVDYVNPTEAETILDNITQGTQSFNDFTRVVGGEDAKPGQFPWQVVLNGKVDAFCGGSIVNEKWIVTAAHCVETGVKITVVAGEHNIEETEHTEQKRNVIRAIIPHHNYNAAINKYNHDIALLELDEPLVLNSYVTPICIADKEYTNIFLKFGSGYVSGWARVFHKGRSALVLQYLRVPLVDRATCLRSTKFTIYNNMFCAGFHEGGRDSCQGDSGGPHVTEVEGTSFLTGIISWGEECAMKGKYGIYTKVSRYVNWIKEKTKLT

SEQ ID NO: 1741 - protein, 415 aa, Homo sapiens
YNSGKLEEFVQGNLERECMEEKCSFEEAREVFENTERTTEFWKQYVDGDQCESNPCLNGGSCKDDINSYECWCPFGFEGKNCELDATCNIKNGRCEQFCKNSADNKVVCSCTEGYRLAENQKSCEPAVPFPCGRVSVSQTSKLTRAETVFPDVDYVNSTEAETILDNITQSTQSFNDFTRVVGGEDAKPGQFPWQVVLNGKVDAFCGGSIVNEKWIVTAAHCVETGVKITVVAGEHNIEETEHTEQKRNVIRIIPHHNYNAAINKYNHDIALLELDEPLVLNSYVTPICIADKEYTNIFLKFGSGYVSGWGRVFHKGRSALVLQYLRVPLVDRATCLRSTKFTIYNNMFCAGFHEGGRDSCQGDSGGPHVTEVEGTSFLTGIISWGEECAMKGKYGIYTKVSRYVNWIKEKTKLT

SEQ ID NO: 1742 - protein, 415 aa, Homo sapiens
YNSGKLEEFVQGNLERECMEEKCSFEEAREVFENTERTTEFWKQYVDGDQCESNPCLNGGSCKDDINSYECWCPFGFEGKNCELDVTCNIKNGRCEQFCKNSADNKVVCSCTEGYRLAENQKSCEPAVPFPCGRVSVSQTSKLTRAETVFPDVDYVNSTEAETILDNITQSTQSFNDFTRVVGGEDAKPGQFPWQVVLNGKVDAFCGGSIVNEKWIVTAAHCVETGVKITVVAGEHNIEETEHTEQKRNVIRIIPHHNYNAAINKYNHDIALLELDAPLVLNSYVTPICIADKEYTNIFLKFGSGYVSGWGRVFHKGRSALVLQYLRVPLVDRATCLRSTKFTIYNNMFCAGFHEGGRDSCQGDSGGPHVTEVEGTSFLTGIISWGEECAMKGKYGIYTKVSRYVNWIKEKTKLT

SEQ ID NO: 1743 - protein, 415 aa, Homo sapiens
YNSGKLEEFVQGNLERECMEEKCSFEEAREVFENTERTTEFWKQYVDGDQCESNPCLNGGSCKDDINSYECWCPFGFEGKNCELDATCNIKNGRCEQFCKNSADNKVVCSCTEGYRLAENQKSCEPAVPFPCGRVSVSQTSKLTRAETVFPDVDYVNSTEAETILDNITQSTQSFNDFTRVVGGEDAKPGQFPWQVVLNGKVDAFCGGSIVNEKWIVTAAHCVETGVKITVVAGEHNIEETEHTEQKRNVIRIIPHHNYNAAINKYNHDIALLELDAPLVLNSYVTPICIADKEYTNIFLKFGSGYVSGWGRVFHKGRSALVLQYLRVPLVDRATCLRSTKFTIYNNMFCAGFHEGGRDSCQGDSGGPHVTEVEGTSFLTGIISWGEECAMKGKYGIYTKVSRYVNWIKEKTKLT

SEQ ID NO: 1744 - protein, 415 aa, Homo sapiens
YNSGKLEEFVQGNLERECMEEKCSFEEAREVFENTERTTEFWKQYVDGDQCESNPCLNGGSCKDDINSYECWCPFGFEGKNCELDATCNIKNGRCEQFCKNSADNKVVCSCTEGYRLAENQKSCEPAVPFPCGRVSVSQTSKLTRAETVFPDVDYVNSTEAETILDNITQSTQSFNDFTRVVGGEDAKPGQFPWQVVLNGKVDAFCGGSIVNEKWIVTAAHCVETGVKITVVAGEHNIEETEHTEQKRNVIRIIPHHNYNAAINKYNHDIALLELDEPLVLNSYVTPICIADKEYTNIFLKFGSGYVSGWGRVFHKGRSALVLQYLRVPLVDRATCLASTKFTIYNNMFCAGFHEGGRDSCQGDSGGPHVTEVEGTSFLTGIISWGEECAMKGKYGIYTKVSRYVNWIKEKTKLT

SEQ ID NO: 1745 - protein, 415 aa, Homo sapiens
YNSGKLEEFVQGNLERECMEEKCSFEEAREVFENTERTTEFWKQYVDGDQCESNPCLNGGSCKDDINSYECWCPFGFEGKNCELDVTCNIKNGRCEQFCKNSADNKVVCSCTEGYRLAENQKSCEPAVPFPCGRVSVSQTSKLTRAETVFPDVDYVNSTEAETILDNITQSTQSFNDFTRVVGGEDAKPGQFPWQVVLNGKVDAFCGGSIVNEKWIVTAAHCVETGVKITVVAGEHNIEETEHTEQKRNVIRIIPHHNYNAAINKYNHDIALLELDAPLVLNSYVTPICIADKEYTNIFLKFGSGYVSGWGRVFHKGRSALVLQYLRVPLVDRATCLASTKFTIYNNMFCAGFHEGGRDSCQGDSGGPHVTEVEGTSFLTGIISWGEECAMKGKYGIYTKVSRYVNWIKEKTKLT

SEQ ID NO: 1746 - protein, 415 aa, Homo sapiens
YNSGKLEEFVQGNLERECMEEKCSFEEAREVFENTERTTEFWKQYVDGDQCESNPCLNGGSCKDDINSYECWCPFGFEGKNCELDATCNIKNGRCEQFCKNSADNKVVCSCTEGYRLAENQKSCEPAVPFPCGRVSVSQTSKLTRAETVFPDVDYVNSTEAETILDNITQSTQSFNDFTRVVGGEDAKPGQFPWQVVLNGKVDAFCGGSIVNEKWIVTAAHCVETGVKITVVAGEHNIEETEHTEQKRNVIRIIPHHNYNAAINKYNHDIALLELDAPLVLNSYVTPICIADKEYTNIFLKFGSGYVSGWGRVFHKGRSALVLQYLRVPLVDRATCLASTKFTIYNNMFCAGFHEGGRDSCQGDSGGPHVTEVEGTSFLTGIISWGEECAMKGKYGIYTKVSRYVNWIKEKTKLT

SEQ ID NO: 1747 - protein, 406 aa, unidentified [sequence omitted]

SEQ ID NO: 1748-1749 - skipped (2 entries)

SEQ ID NO: 1750 - protein, 191 aa, Homo sapiens [sequence omitted]

SEQ ID NO: 1751 - protein, 190 aa, Sus scrofa
FPAMPLSSLFANAVLRAQHLHQLAADTYKEFERAYIPEGQRYSIQNAQAAFCFSETIPAPTGKDEAQQRSDVELLRFSLLLIQSWLGPVQFLSRVFTNSLVFGTSDRVYEKLKDLEEGIQALMRELEDGSPRAGQILKQTYDKFDTNLRSDDALLKNYGLLSCFKKDLHKAETYLRVMKCRRFVESSCAF

SEQ ID NO: 1752 - protein, 190 aa, Vicugna pacos
FPAMPLSSLFANAVLRAQHLHQLAADTYKEFERTYIPEGQRYSIQNAQAAFCFSETIPAPTGKDEAQQRSDVELLRFSLLLIQSWLGPVQFLSRVFTNSLVFGTSDRVYEKLKDLEEGIQALMRELEDGSPRAGQILRQTYDKFDTNLRSDDALLKNYGLLSCFKKDLHKAETYLRVMKCRRFVESSCAF

SEQ ID NO: 1753 - protein, 190 aa, Camelus sp.; identical to SEQ ID NO: 1752

SEQ ID NO: 1754 - protein, 190 aa, Equus sp.
FPAMPLSSLFANAVLRAQHLHQLAADTYKEFERAYIPEGQRYSIQNAQAAFCFSETIPAPTGKDEAQQRSDMELLRFSLLLIQSWLGPVQLLSRVFTNSLVFGTSDRVYEKLRDLEEGIQALMRELEDGSPRAGQILKQTYDKFDTNLRSDDALLKNYGLLSCFKKDLHKAETYLRVMKCRRFVESSCAF

SEQ ID NO: 1755 - protein, 190 aa, Loxodonta sp.
FPAMPLSSLFANAVLRAQHLHQLAADTYKEFERAYIPEGQRYSIQNAQAAFCFSETIPAPTGKDEAQQRSDVELLRFSLLLIQSWLGPVQFLSRVFTNSLVFGTSDRVYEKLKDLEEGIQALMRELEDGSPRPGQVLKQTYDKFDTNMRSDDALLKNYGLLSCFKKDLHKAETYLRVMKCRRFVESSCAF

SEQ ID NO: 1756 - protein, 190 aa, Vulpes vulpes
FPAMPLSSLFANAVLRAQHLHQLAADTYKEFERAYIPEGQRYSIQNAQAAFCFSETIPAPTGKDEAQQRSDVELLRFSLVLIQSWLGPLQFLSRVFTNSLVFGTSDRVYEKLKDLEEGIQALMRELEDGSPRAGQILKQTYDKFDTNLRSDDALLKNYGLLSCFKKDLHKAETYLRVMKCRRFVESSCAF

SEQ ID NO: 1757 - protein, 190 aa, Canis lupus; identical to SEQ ID NO: 1751

SEQ ID NO: 1758 - protein, 190 aa, Felis catus
FPAMPLSSLFANAVLRAQHLHQLAADTYKEFERAYIPEGQRYSIQNAQAAFCFSETIPAPTGKDEAQQRSDVELLRFSLLLIQSWLGPVQFLSRVFTNSLVFGTSDRVYEKLKDLEEGIQALMRELEDGSPRGGQILKQTYDKFDTNLRSDDALLKNYGLLSCFKKDLHKAETYLRVMKCRRFVESSCAF

SEQ ID NO: 1759 - protein, 190 aa, unidentified
FPAMPLSSLFANAVLRAQHLHQLAADTYKDFERAYIPEGQRYSIQNAQAAFCFSETIPAPTGKDEAQQRSDMELLRFSLLLIQSWLGPVQFLSRVFTNSLVFGTSDRVYEKLKDLEEGIQALMRELEDGSPRAGPILKQTYDKFDTNLRSDDALLKNYGLLSCFKKDLHKAETYLRVMKCRRFVESSCAF

SEQ ID NO: 1760 - protein, 190 aa, Balaenoptera sp.
FPAMPLSSLFANAVLRAQHLHQLAADTYKEFERAYIPEGQRYSIQNAQAAFCFSETIPAPTGKDEAQQRSDVELLRFSLLLIQSWLGPVQFLSRVFTNSLVFGTSDRVYEKLKDLEEGIQALMRELEDGSPRAGQILKQTYDKFDTNMRSDDALLKNYGLLSCFKKDLHKAETYLRVMKCRRFVESSCAF

SEQ ID NO: 1761 - protein, 190 aa, Delphinus sp.
FPAMPLSSLFANAVLRAQHLHQLAADTYKEFERAYIPEGQRYSIQNTQAAFCFSETIPAPTGKDEAQQRSDVELLRFSLLLIQSWLGPVQFLSRVFTNSLVFGTSDRVYEKLKDLEEGIQALMRELEDGSPRAGQILKQTYDKFDTNMRSDDALLKNYGLLSCFKKDLHKAETYLRVMKCRRFVESSCAF

SEQ ID NO: 1762 - protein, 190 aa, Hippopotamus amphibius; identical to SEQ ID NO: 1761

SEQ ID NO: 1763 - protein, 190 aa, Oryctolagus cuniculus
FPAMPLSSLFANAVLRAQHLHQLAADTYKEFERAYIPEGQRYSIQNAQAAFCFSETIPAPTGKDEAQQRSDMELLRFSLLLIQSWLGPVQFLSRAFTNTLVFGTSDRVYEKLKDLEEGIQALMRELEDGSPRVGQLLKQTYDKFDTNLRGDDALLKNYGLLSCFKKDLHKAETYLRVMKCRRFVESSCVF

SEQ ID NO: 1764 - protein, 190 aa, Rattus norvegicus
FPAMPLSSLFANAVLRAQHLHQLAADTYKEFERAYIPEGQRYSIQNAQAAFCFSETIPAPTGKEEAQQRTDMELLRFSLLLIQSWLGPVQFLSRIFTNSLMFGTSDRVYEKLKDLEEGIQALMQELEDGSPRIGQILKQTYDKFDANMRSDDALLKNYGLLSCFKKDLHKAETYLRVMKCRRFAESSCAF

SEQ ID NO: 1765 - protein, 190 aa, Mus musculus
FPAMPLSSLFSNAVLRAQHLHQLAADTYKEFERAYIPEGQRYSIQNAQAAFCFSETIPAPTGKEEAQQRTDMELLRFSLLLIQSWLGPVQFLSRIFTNSLMFGTSDRVYEKLKDLEEGIQALMQELEDGSPRVGQILKQTYDKFDANMRSDDALLKNYGLLSCFKKDLHKAETYLRVMKCRRFVESSCAF

SEQ ID NO: 1766 - protein, 190 aa, Mesocricetus auratus
FPAMPLSSLFANAVLRAQHLHQLAADTYKEFERAYIPEGQRYSIQNAQTAFCFSETIPAPTGKEEAQQRSDMELLRFSLLLIQSWLGPVQFLSRIFTNSLMFGTSDRVYEKLKDLEEGIQALMQELEDGSPRVGQILKQTYDKFDTNMRSDDALLKNYGLLSCFKKDLHKAETYLRVMKCRRFVESSCAF

SEQ ID NO: 1767 - protein, 190 aa, unidentified
FPAMPLSNLFANAVLRAQHLHQLAADTYKEFERAYIPEGQRYSIQNAQAAFCFSETIPAPTGKEEAQQRSDMELLRFSLLLIQSWLGPVQFLSRVFTNSLVFGTSDRVFEKLKDLEEGIQALMRELEDGSLRAGQLLKQTYDKFDTNMRSDDALLKNYGLLSCFKKDLHKAETYLRVMKCRRFVESSCAF

SEQ ID NO: 1768 - protein, 190 aa, Cavia porcellus
FPAMPLSSLFGNAVLRAQHLHQLAADTYKEFERTYIPEGQRYSIHNTQTAFCFSETIPAPTDKEEAQQRSDVELLHFSLLLIQSWLGPVQFLSRVFTNSLVFGTSDRVYEKLKDLEEGIQALMRELEDGTPRAGQILKQTYDKFDTNLRSNDALLKNYGLLSCFRKDLHRTETYLRVMKCRRFVESSCAF

SEQ ID NO: 1769 - protein, 191 aa, Bos taurus
AFPAMSLSGLFANAVLRAQHLHQLAADTFKEFERTYIPEGQRYSIQNTQVAFCFSETIPAPTGKNEAQQKSDLELLRISLLLIQSWLGPLQFLSRVFTNSLVFGTSDRVYEKLKDLEEGILALMRELEDGTPRAGQILKQTYDKFDTNMRSDDALLKNYGLLSCFRKDLHKTETYLRVMKCRRFGEASCAF

SEQ ID NO: 1770 - protein, 191 aa, unidentified
  REGION 1..191: note = Description of Unknown: Sheep/Goat sequence
AFPAMSLSGLFANAVLRAQHLHQLAADTFKEFERTYIPEGQRYSIQNTQVAFCFSETIPAPTGKNEAQQKSDLELLRISLLLIQSWLGPLQFLSRVFTNSLVFGTSDRVYEKLKDLEEGILALMRELEDVTPRAGQILKQTYDKFDTNMRSDDALLKNYGLLSCFRKDLHKTETYLRVMKCRRFGEASCAF

SEQ ID NO: 1771 - protein, 190 aa, Cervus elaphus
FPAMSLSGLFANAVLRAQHLHQLAADTFKEFERTYIPEGQRYSIQNTQVAFCFSETIPAPTGKNEAQQKSDLELLRISLLLIQSWLGPLQFLSRVFTNSLVFGTSDRVYEKLKDLEEGILALMRELEDGTPRAGQILKQTYDKFDTNMRSDDALLKNYGLLSCFRKDLHKTETYLRVMKCRRFGEASCAF

SEQ ID NO: 1772 - protein, 191 aa, Giraffa camelopardalis
AFPAMSLSGLFANAVLRAQHLHQLAADTFKEFERTYIPEGQRYSIQNTQVAFCFSETIPAPTGKNEAQQKSDLELLRISLLLIQSWLGPLQFLSRVFSNSLVFGTSDRVYEKLKDLEEGILALMRELEDGTPRAGQILKQTYDKFDTNMRSDDALLKNYGLLSCFRKDLHKTETYLRVMKCRRFGEASCAF

SEQ ID NO: 1773 - protein, 190 aa, Tragulus javanicus
FPAMSLSGLFANAVLRVQHLHQLAADTFKEFERTYIPEGQRYSIQNTQVAFCFSETIPAPTGKNEAQQKSDLELLRISLLLIQSWLGPLQFLSRVFTNSLVFGTSDRVYEKLKDLEEGILALMRELEDGPPRAGQILKQTYDKFDTNMRSDDALLKNYGLLSCFRKDLHKTETYLRVMKCRRFGEASCAF

SEQ ID NO: 1774 - protein, 190 aa, Nycticebus pygmaeus
FPAMPLSSLFANAVLRAQHLHQLAADTYKEFERAYIPEGQRYSIQNAQAAFCFSETIPAPTGKDEAQQRSDMELLRFSLLLIQSWLGPVQLLSRVFTNSLVLGTSDRVYEKLKDLEEGIQALMRELEDGSPRVGQILKQTYDKFDTNLRSDDALLKNYGLLSCFKKDLHKAETYLRVMKCRRFVESSCAF

SEQ ID NO: 1775 - protein, 191 aa, Callithrix jacchus
FPTIPLSRLLDNAMLRAHRLHQLAFDTYQEFEEAYIPKEQKYSFLQNPQTSLCFSESIPTPASKKETQQKSNLELLRMSLLLIQSWFEPVQFLRSVFANSLLYGVSDSDVYEYLKDLEEGIQTLMGRLEDGSPRTGEIFMQTYRKFDVNSQNNDALLKNYGLLYCFRKDMDKVETFLRIVQCRSVEGSCGF

SEQ ID NO: 1776 - protein, 190 aa, Trichosurus vulpecula
FPAMPLSSLFANAVLRAQHLHQLVADTYKEFERTYIPEAQRHSIQSTQTAFCFSETIPAPTGKDEAQQRSDVELLRFSLLLIQSWLSPVQFLSRVFTNSLVFGTSDRVYEKLRDLEEGIQALMQELEDGSSRGGLVLKTTYDKFDTNLRSDEALLKNYGLLSCFKKDLHKAETYLRVMKCRRFVESSCAF

SEQ ID NO: 1777 - protein, 191 aa, Macaca mulatta
FPTIPLSRLFDNAMLRAHRLHQLAFDTYQEFEEAYIPKEQKYSFLQNPQTSLCFSESIPTPSNREETQQKSNLELLRISLLLIQSWLEPVQFLRSVFANSLVYGTSYSDVYDLLKDLEEGIQTLMGRLEDGSSRTGQIFKQTYSKFDTNSHNNDALLKNYGLLYCFRKDMDKIETFLRIVQCRSVEGSCGF

SEQ ID NO: 1778-8000 - skipped (6223 entries)

SEQ ID NO: 8001 - protein, 874 aa, synthetic construct
  REGION 1..874: note = Description of Artificial Sequence: Synthetic polypeptide
PGSPAGSPTSTEEGTSESATPESGPGTSTEPSEGSAPGSPAGSPTSTEEGTSTEPSEGSAPGTSTEPSEGSAPGTSESATPESGPGSEPATSGSETPGSEPATSGSETPGSPAGSPTSTEEGTSESATPESGPGTSTEPSEGSAPGTSTEPSEGSAPGSPAGSPTSTEEGTSTEPSEGSAPGTSTEPSEGSAPGTSESATPESGPGTSTEPSEGSAPGTSESATPESGPGSEPATSGSETPGTSTEPSEGSAPGTSTEPSEGSAPGTSESATPESGPGTSESATPESGPGSPAGSPTSTEEGTSESATPESGPGSEPATSGSETPGTSESATPESGPGTSTEPSEGSAPGTSTEPSEGSAPGTSTEPSEGSAPGTSTEPSEGSAPGTSTEPSEGSAPGTSTEPSEGSAPGSPAGSPTSTEEGTSTEPSEGSAPGTSESATPESGPGSEPATSGSETPGTSESATPESGPGSEPATSGSETPGTSESATPESGPGTSTEPSEGSAPGTSESATPESGPGSPAGSPTSTEEGSPAGSPTSTEEGSPAGSPTSTEEGTSESATPESGPGTSTEPSEGSAPGTSESATPESGPGSEPATSGSETPGTSESATPESGPGSEPATSGSETPGTSESATPESGPGTSTEPSEGSAPGSPAGSPTSTEEGTSESATPESGPGSEPATSGSETPGTSESATPESGPGSPAGSPTSTEEGSPAGSPTSTEEGTSTEPSEGSAPGTSESATPESGPGTSESATPESGPGFTABTSESATPESGPGSEPATSGPTESGSEPATSGSETPGSPAGSPTSTEEGTSTEPSEGSAPGTESTPSEGSAPGSEPATSGSETPGTSESATPESGPGTSTEPSEGSAPGEPEA

SEQ ID NO: 8002 - protein, 870 aa, synthetic construct
  REGION 1..870: note = Description of Artificial Sequence: Synthetic polypeptide
PGSPAGSPTSTEEGTSESATPESGPGTSTEPSEGSAPGSPAGSPTSTEEGTSTEPSEGSAPGTSTEPSEGSAPGTSESATPESGPGSEPATSGSETPGSEPATSGSETPGSPAGSPTSTEEGTSESATPESGPGTSTEPSEGSAPGTSTEPSEGSAPGSPAGSPTSTEEGTSTEPSEGSAPGTSTEPSEGSAPGTSESATPESGPGTSTEPSEGSAPGTSESATPESGPGSEPATSGSETPGTSTEPSEGSAPGTSTEPSEGSAPGTSESATPESGPGTSESATPESGPGSPAGSPTSTEEGTSESATPESGPGSEPATSGSETPGTSESATPESGPGTSTEPSEGSAPGTSTEPSEGSAPGTSTEPSEGSAPGTSTEPSEGSAPGTSTEPSEGSAPGTSTEPSEGSAPGSPAGSPTSTEEGTSTEPSEGSAPGTSESATPESGPGSEPATSGSETPGTSESATPESGPGSEPATSGSETPGTSESATPESGPGTSTEPSEGSAPGTSESATPESGPGSPAGSPTSTEEGSPAGSPTSTEEGSPAGSPTSTEEGTSESATPESGPGTSTEPSEGSAPGTSESATPESGPGSEPATSGSETPGTSESATPESGPGSEPATSGSETPGTSESATPESGPGTSTEPSEGSAPGSPAGSPTSTEEGTSESATPESGPGSEPATSGSETPGTSESATPESGPGSPAGSPTSTEEGSPAGSPTSTEEGTSTEPSEGSAPGTSESATPESGPGTSESATPESGPGTSESATPESGPGSEPATSGPTESGSEPATSGSETPGSPAGSPTSTEEGTSTEPSEGSAPGTSTEPSEGSAPGSEPATSGSETPGTSESATPESGPGTSTEPSEGSAPGEPEA

SEQ ID NO: 8003 - protein, 870 aa, synthetic construct
  REGION 1..870: note = Description of Artificial Sequence: Synthetic polypeptide
PGSPAGSPTSTEEGTSESATPESGPGTSTEPSEGSAPGSPAGSPTSTEEGTSTEPSEGSAPGTSTEPSEGSAPGTSESATPESGPGSEPATSGSETPGSEPATSGSETPGSPAGSPTSTEEGTSESATPESGPGTSTEPSEGSAPGTSTEPSEGSAPGSPAGSPTSTEEGTSTEPSEGSAPGTSTEPSEGSAPGTSESATPESGPGTSTEPSEGSAPGTSESATPESGPGSEPATSGSETPGTSTEPSEGSAPGTSTEPSEGSAPGTSESATPESGPGTSESATPESGPGSPAGSPTSTEEGTSESATPESGPGSEPATSGSETPGTSESATPESGPGTSTEPSEGSAPGTSTEPSEGSAPGTSTEPSEGSAPGTSTEPSEGSAPGTSTEPSEGSAPGTSTEPSEGSAPGSPAGSPTSTEEGTSTEPSEGSAPGTSESATPESGPGSEPATSGSETPGTSESATPESGPGSEPATSGSETPGTSESATPESGPGTSTEPSEGSAPGTSESATPESGPGSPAGSPTSTEEGSPAGSPTSTEEGSPAGSPTSTEEGTSESATPESGPGTSTEPSEGSAPGTSESATPESGPGSEPATSGSETPGTSESATPESGPGSEPATSGSETPGTSESATPESGPGTSTEPSEGSAPGSPAGSPTSTEEGTSESATPESGPGSEPATSGSETPGTSESATPESGPGSPAGSPTSTEEGSPAGSPTSTEEGTSTEPSEGSAPGTSESATPESGPGTSESATPESGPGTSESATPESGPGSEPATSGSETPGSEPATSGSETPGSPAGSPTSTEEGTSTEPSEGSAPGTESTPSEGSAPGSEPATSGSETPGTSESATPESGPGTSTEPSEGSAPGEPEA

SEQ ID NO: 8004 - protein, 294 aa, synthetic construct
  REGION 1..294: note = Description of Artificial Sequence: Synthetic polypeptide
ASSPAGSPTSTESGTSESATPESGPGTETEPSEGSAPGTSESATPESGPGSEPATSGSETPGTSESATPESGPGSTPAESGSETPGTSESATPESGPGTSTEPSEGSAPGSPAGSPTSTEEGTSESATPESGPGESPATSGSTPEGTSESATPESGPGSPAGSPTSTEEGSPAGSPTSTEEGTSTEPSEGSAPGTSESATPESGPGTSESATPESGPGTSESATPESGPGSEPATSGSETPGSEPATSGSETPGSPAGSPTSTEEGTSTEPSEGSAPGTSTEPSEGSAPGGSAP

SEQ ID NO: 8005 - protein, 294 aa, synthetic construct
  REGION 1..294: note = Description of Artificial Sequence: Synthetic polypeptide
ASSPAGSPTSTESGTSESATPESGPGTSTEPSEGSAPGTSESATPESGPGSEPATSGSETPGTSESATPESGPGSEPATSGSETPGTSESATPESGPGTSTEPSEGSAPGSPAGSPTSTEEGTSESATPESGPGESPATSGSTPEGTSESATPESGPGSPAGSPTSTEEGSPAGSPTSTEEGTSTEPSEGSAPGTSESATPESGPGTSESATPESGPGTSESATPESGPGSEPATSGSETPGSEPATSGSETPGSPAGSPTSTEEGTSTEPSEGSAPGTSTEPSEGSAPGGSAP

SEQ ID NO: 8006 - protein, 294 aa, synthetic construct
  REGION 1..294: note = Description of Artificial Sequence: Synthetic polypeptide
ASSPAGSPTSTESGTSESATPESGPGTSTEPSEGSAPGTSESATPESGPGSEPATSGSETPGTSESATPESGPGSTPAESGSETPGTSESATPESGPGTSTEPSEGSAPGSPAGSPTSTEEGTSESATPESGPGEEPATSGSTPEGTSESATPESGPGSPAGSPTSTEEGSPAGSPTSTEEGTSTEPSEGSAPGTSESATPESGPGTSESATPESGPGTSESATPESGPGSEPATSGSETPGSEPATSGSETPGSPAGSPTSTEEGTSTEPSEGSAPGTSTEPSEGSAPGGSAP

SEQ ID NO: 8007 - protein, 294 aa, synthetic construct
  REGION 1..294: note = Description of Artificial Sequence: Synthetic polypeptide
ASSPAGSPTSTESGTSESATPESGPGTSTEPSEGSAPGTSESATPESGPGSEPATSGSETPGTSESATPESGPGSTPAESGSETPGTSESATPESGPGTSTEPSEGSAPGSPAGSPTSTEEGTSESATPESGPGSEPATSGSETPGTSESATPESGPGSPAGSPTSTEEGSPAGSPTSTEEGTSTEPSEGSAPGTSESATPESGPGTSESATPESGPGTSESATPESGPGSEPATSGSETPGSEPATSGSETPGSPAGSPTSTEEGTSTEPSEGSAPGTSTEPSEGSAPGGSAP

SEQ ID NO: 8008 - protein, 866 aa, synthetic construct
  REGION 1..866: note = Description of Artificial Sequence: Synthetic polypeptide
PGSPAGSPTSTEEGTSESATPESGPGTSTEPSEGSAPGSPAGSPTSTEEGTSTEPSEGSAPGTSTEPSEGSAPGTSESATPESGPGSEPATSGSETPGSEPATSGSETPGSPAGSPTSTEEGTSESATPESGPGTSTEPSEGSAPGTSTEPSEGSAPGSPAGSPTSTEEGTSTEPSEGSAPGTSTEPSEGSAPGTSESATPESGPGTSTEPSEGSAPGTSESATPESGPGSEPATSGSETPGTSTEPSEGSAPGTSTEPSEGSAPGTSESATPESGPGTSESATPESGPGSPAGSPTSTEEGTSESATPESGPGSEPATSGSETPGTSESATPESGPGTSTEPSEGSAPGTSTEPSEGSAPGTSTEPSEGSAPGTSTEPSEGSAPGTSTEPSEGSAPGTSTEPSEGSAPGSPAGSPTSTEEGTSTEPSEGSAPGTSESATPESGPGSEPATSGSETPGTSESATPESGPGSEPATSGSETPGTSESATPESGPGTSTEPSEGSAPGTSESATPESGPGSPAGSPTSTEEGSPAGSPTSTEEGSPAGSPTSTEEGTSESATPESGPGTSTEPSEGSAPGTSESATPESGPGSEPATSGSETPGTSESATPESGPGSEPATSGSETPGTSESATPESGPGTSTEPSEGSAPGSPAGSPTSTEEGTSESATPESGPGSEPATSGSETPGTSESATPESGPGSPAGSPTSTEEGSPAGSPTSTEEGTSTEPSEGSAPGTSESATPESGPGTSESATPESGPGTSESATPESGPGSEPATSGSETPGSEPATSGSETPGSPAGSPTSTEEGTSTEPSEGSAPGTESTPSEGSAPGSEPATSGSETPGTSESATPESGPGTSTEPSEGSAPG

SEQ ID NO: 8009 - protein, 578 aa, synthetic construct
  REGION 1..578: note = Description of Artificial Sequence: Synthetic polypeptide
PGSPAGSPTSTEEGTSESATPESGPGSEPATSGSETPGTSESATPESGPGTSTEPSEGSAPGTSTEPSEGSAPGTSTEPSEGSAPGTSTEPSEGSAPGTSTEPSEGSAPGTSTEPSEGSAPGSPAGSPTSTEEGTSTEPSEGSAPGTSESATPESGPGSEPATSGSETPGTSESATPESGPGSEPATSGSETPGTSESATPESGPGTSTEPSEGSAPGTSESATPESGPGSPAGSPTSTEEGSPAGSPTSTEEGSPAGSPTSTEEGTSESATPESGPGTSTEPSEGSAPGTSESATPESGPGSEPATSGSETPGTSESATPESGPGSEPATSGSETPGTSESATPESGPGTSTEPSEGSAPGSPAGSPTSTEEGTSESATPESGPGSEPATSGSETPGTSESATPESGPGSPAGSPTSTEEGSPAGSPTSTEEGTSTEPSEGSAPGTSESATPESGPGTSESATPESGPGTSESATPESGPGSEPATSGSETPGSEPATSGSETPGSPAGSPTSTEEGTSTEPSEGSAPGTESTPSEGSAPGSEPATSGSETPGTSESATPESGPGTSTEPSEGSAPG

SEQ ID NO: 8010 - protein, 1152 aa, synthetic construct
  REGION 1..1152: note = Description of Artificial Sequence: Synthetic polypeptide
SAGSPGSPAGSPTSTEEGTSESATPESGPGTSTEPSEGSAPGSPAGSPTSTEEGTSTEPSEGSAPGTSTEPSEGSAPGTSESATPESGPGSTPAESGSETPGSEPATSGSETPGSPAGSPTSTEEGTSESATPESGPGTSTEPSEGSAPGTSTEPSEGSAPGSPAGSPTSTEEGTSTEPSEGSAPGTSTEPSEGSAPGTSESATPESGPGTSTEPSEGSAPGTSESATPESGPGSEPATSGSTETPGTSTEPSEGSAPGTSTEPSEGSAPGTSESATPESGPGTSESATPESGPGSPAGSPTSTEEGTSESATPESGPGSEPATSGSETPGTSESATPESGPGTSTEPSEGSAPGTSTEPSEGSAPGTSTEPSEGSAPGTSTEPSEGSAPGTSTEPSEGSAPGTSTEPSEGSAPGSPAGSPTSTEEGTSTEPSEGSAPGTSESATPESGPGSEPATSGSETPGTSESATPESGPGSEPATSGSETPGTSESATPESGPGTSTEPSEGSAPGTSESATPESGPGSPAGSPTSTEEGSPAGSPTSTEEGSPAGSPTSTEEGTSESATPESGPGTSTEPSEGSAPGTSESATPESGPGSEPATSGSETPGTSESATPESGPGSEPATSGSETPGTSESATPESGPGTSTEPSEGSAPGSPAGSPTSTEEGTSESATPESGPGSEPATSGSETPGTSESATPESGPGSPAGSPTSTEEGSPAGSPTSTEEGTSTEPSEGSAPGTSESATPESGPGTSESATPESGPGTSESATPESGPGSEPATSGSETPGSEPATSGSETPGSPAGSPTSTEEGTSTEPSEGSAPGTSTEPSEGSAPGSEPATSGSETPGTSESATPESGPGTSTEPSEGSAPGSPAGSPTSTEEGTSESATPESGPGTSTEPSEGSAPGSPAGSPTSTEEGTSTEPSEGSAPGTSTEPSEGSAPGTSESATPESGPGSEPATSGSETPGSEPATSGSETPGSPAGSPTSTEEGTSESATPESGPGTSTEPSEGSAPGTSTEPSEGSAPGSPAGSPTSTEEGTSTEPSEGSAPGTSTEPSEGSAPGTSESATPESGPGTSTEPSEGSAPGTSESATPESGPGSEPATSGSETPGTSTEPSEGSAPGTSTEPSEGSAPGTSESATPESGPGTESAS

SEQ ID NO: 8011 - protein, 1153 aa, synthetic construct
  REGION 1..1153: note = Description of Artificial Sequence: Synthetic polypeptide
SAGSPGSPAGSPTSTEEGTSESATPESGPGTSTEPSEGSAPGSPAGSPTSTEEGTSTEPSEGSAPGTSTEPSEGSAPGTSESATPESGPGSEPATSGSETPGSEPATSGSETPGSPAGSPTSTEEGTSESATPESGPGTSTEPSEGSAPGTSTEPSEGSAPGSPAGSPTSTEEGTSTEPSEGSAPGTSTEPSEGSAPGTSESATPESGPGTSTEPSEGSAPGTSESATPESGPGSEPATSGSETPGTSTEPSEGSAPGTSTEPSEGSAPGTSESATPESGPGTSESATPESGPGSPAGSPTSTEEGTSESATPESGPGSEPATSGSETPGTSESATPESGPGTSTEPSEGSAPGTSTEPSEGSAPGTSTEPSEGSAPGTSTEPSEGSAPGTSTEPSEGSAPGTSTEPSEGSAPGSPAGSPTSTEEGTSTEPSEGSAPGTSESATPESGPGSEPATSGSETPGTSESATPESGPGSEPATSGSETPGTSESATPESGPGTSTEPSEGSAPGTSESATPESGPGSPAGSPTSTEEGSPAGSPTSTEEGSPAGSPTSTEEGTSESATPESGPGTSTEPSEGSAPGTSESATPESGPGSEPATSGSETPGTSESATPESGPGSEPATSGSETPGTSESATPESGPGTSTEPSEGSAPGSPAGSPTSTEEGTSESATPESGPGSEPATSGSETPGTSESATPESGPGSPAGSPTSTEEGSPAGSPTSTEEGTSTEPSEGSAPGTSESATPESGPGTSESATPESGPGTSESATPESGPGSEPATSGSETPGSEPATSGSETPGSPAGSPTSTEEGTSTEPSEGSAPGTSTEPSEGSAPGSEPATSGSETPGTSESATPESGPGTSTEPSEGSAPGSPAGSPTSTEEGTSESATPESGPGTSTEPSEGSAPGSPAGSPTSTEEGTSTEPSEGSAPGTSTEPSEGSAPGTSESATPESGPGSEPATSGSETPGSEPATSGSTETPGSPAGSPTSTEEGTSESATPESGPGTSTEPSEGSAPGTSTEPSEGSAPGSPAGSPTSTEEGTSTEPSEGSAPGTATESPEGSAPGTSESATPESGPGTSTEPSEGSAPGTSAESATPESGPGSEPATSGSETPGTSTEPSEGSAPGTSTEPSEGSAPGTSESATPESGPGTESAS

SEQ ID NO: 8012 - protein, 864 aa, synthetic construct
  REGION 1..864: note = Description of Artificial Sequence: Synthetic polypeptide
GSPAGSPTSTEEGTSESATPESGPGTSTEPSEGSAPGSPAGSPTSTEEGTSTEPSEGSAPGTSTEPSEGSAPATSESATPESGPGSEPATSGSETPGSEPATSGSETPGSPAGSPTSTEEGTSESASPESGPGTSTEPSEGSAPGTSTEPSEGSAPGSPAGSPTSTEEGTSTEPSEGSAPGTSTEPSEGSAPGTSESATPESGPGTSTEPSEGSAPGTSESATPESGPGSEPATSGSETPGTSTEPSEGSAPGTSTEPSEGSAPGTSESATPESGPGTSESATPESGPGSPAGSPTSTEEGTSESATPESGPGSEPATSGSETPGTSESATPESGPGTSTEPSEGSAPGTSTEPSEGSAPGTSTEPSEGSAPGTSTEPSEGSAPGTSTEPSEGSAPGTSTEPSEGSAPGSPAGSPTSTEEGTSTEPSEGSAPGTSESATPESGPGSEPATSGSETPGTSESATPESGPGSEPATSGSETPGTSESATPESGPGTSTEPSEGSAPGTSESATPESGPGSPAGSPTSTEEGSPAGSPTSTEEGSPAGSPTSTEEGTSESATPESGPGTSTEPSEGSAPGTSESATPESGPGSEPATSGSETPGTSESATPESGPGSEPATSGSETPGTSESATPESGPGTSTEPSEGSAPGSPAGSPTSTEEGTSESATPESGPGSEPATSGSETPGTSESATPESGPGSPAGSPTSTEEGSPAGSPTSTEEGTSTEPSEGSAPGTSESATPESGPGTSESATPESGPGTSESATPESGPGSEPATSGSETPGSEPATSGSETPGSPAGSPTSTEEGTSTEPSEGSAPGTSTEPSEGSAPGSEPATSGSETPGTSESATPESGPGTSTEPSEGSAP

SEQ ID NO: 8013 - protein, 864 aa, synthetic construct
  REGION 1..864: note = Description of Artificial Sequence: Synthetic polypeptide
GSPAGSPTSTEEGTSESATPESGPGTSTEPSEGSAPGSPAGSPTSTEEGTSTEPSEGSAPGTSTEPSEGSAPGTSESATPESGPGSESATSGSETPGSEPATSGSETPGSPAGSPTSTEEGTSESATPESGPGTSTEPSEGSAPGTSTEPSEGSAPGSPAGSPTSTEEGTSTEPSEGSAPGTSTEPSEGSAPGTSESATPESGPGTSTEPSEGSAPGTSESATPESGPGSEPATSGSETPGTSTEPSEGSAPGTSTEPSEGSAPGTSESATPESGPGTSESATPESGPGSPAGSPTSTEEGTSESATPESGPGSEPATSGSETPGTSESATPESGPGTSTEPSEGSAPGTSTEPSEGSAPGTSTEPSEGSAPGTSTEPSEGSAPGTSTEPSEGSAPGTSTEPSEGSAPGSPAGSPTSTEEGTSTEPSEGSAPGTSESATPESGPGSEPATSGSETPGTSESATPESGPGSEPATSGSETPGTSESATPESGPGTSTEPSEGSAPGTSESATPESGPGSPAGSPTSTEEGSPAGSPTSTEEGSPAGSPTSTEEGTSESATPESGPGTSTEPSEGSAPGTSESATPESGPGSEPATSGSETPGTSESATPESGPGSEPATSGSETPGTSESATPESGPGTSTEPSEGSAPGSPAGSPTSTEEGTSESATPESGPGSEPATSGSETPGTSESATPESGPGSPAGSPTSTEEGSPAGSPTSTEEGTSTEPSEGSAPGTSESATPESGPGTSESATPESGPGTSESATPESGPGSEPATSGSETPGSEPATSGSETPGSPAGSPTSTEEGTSTEPSEGSAPGTSTEPSEGSAPGSEPATSGSETPGTSESATPESGPGTSTEPSEGSAP

SEQ ID NO: 8014 - protein, 292 aa, synthetic construct
  REGION 1..292: note = Description of Artificial Sequence: Synthetic polypeptide
SPAGSPTSTESGTSESATPESGPGTSTEPSEGSAPGTSESATPESGPGSEPATSGSETPGTSESATPESGPGSTPAESGSETPGTSESATPESGPGTSTEPSEGSAPGSPAGSPTSTEEGTSESATPESGPGSEPATSGSETPGTSESATPESGPGSPAGSPTSTEEGSPAGSPTSTEEGTSTEPSEGSAPGTSESATPESGPGTSESATPESGPGTSESATPESGPGSEPATSGSETPGSEPATSGSETPGSPAGSPTSTEEGTSTEPSEGSAPGTSTEPSEGSAPGGSAP

SEQ ID NO: 8015 - protein, 582 aa, synthetic construct
  REGION 1..582: note = Description of Artificial Sequence: Synthetic polypeptide
PGSPAGSPTSTEEGTSESATPESGPGSEPATSGSETPGTSESATPESGPGTSTEPSEGSAPGTSTEPSEGSAPGTSTEPSEGSAPGTSTEPSEGSAPGTSTEPSEGSAPGTSTEPSEGSAPGSPAGSPTSTEEGTSTEPSEGSAPGTSESATPESGPGSEPATSGSETPGTSESATPESGPGSEPATSGSETPGTSESATPESGPGTSTEPSEGSAPGTSESATPESGPGSPAGSPTSTEEGSPAGSPTSTEEGSPAGSPTSTEEGTSESATPESGPGTSTEPSEGSAPGTSESATPESGPGSEPATSGSETPGTSESATPESGPGSEPATSGSETPGTSESATPESGPGTSTEPSEGSAPGSPAGSPTSTEEGTSESATPESGPGSEPATSGSETPGTSESATPESGPGSPAGSPTSTEEGSPAGSPTSTEEGTSTEPSEGSAPGTSESATPESGPGTSESATPESGPGTSESATPESGPGSEPATSGSETPGSEPATSGSETPGSPAGSPTSTEEGTSTEPSEGSAPGTESTPSEGSAPGSEPATSGSETPGTSESATPESGPGTSTEPSEGSAPGEPEA

SEQ ID NO: 8016 - protein, 576 aa, synthetic construct
  REGION 1..576: note = Description of Artificial Sequence: Synthetic polypeptide
TPESGPGTSESATPESGPGSPAGSPTSTEEGTSESATPESGPGSEPATSGSETPGTSESATPESGPGTSTEPSEGSAPGTSTEPSEGSAPGTSTEPSEGSAPGTSTEPSEGSAPGTSTEPSEGSAPGTSTEPSEGSAPGSPAGSPTSTEEGTSTEPSEGSAPGTSESATPESGPGSEPATSGSETPGTSESATPESGPGSEPATSGSETPGTSESATPESGPGTSTEPSEGSAPGTSESATPESGPGSPAGSPTSTEEGSPAGSPTSTEEGSPAGSPTSTEEGTSESATPESGPGTSTEPSEGSAPGTSESATPESGPGSEPATSGSETPGTSESATPESGPGSEPATSGSETPGTSESATPESGPGTSTEPSEGSAPGSPAGSPTSTEEGTSESATPESGPGSEPATSGSETPGTSESATPESGPGSPAGSPTSTEEGSPAGSPTSTEEGTSTEPSEGSAPGTSESATPESGPGTSESATPESGPGTSESATPESGPGSEPATSGSETPGSESATSGSETPGSPAGSPTSTEEGTSTEPSEGSAPGTSTEPSEGSAPGSEPATSGSETPGTSESA

SEQ ID NO: 8017 - protein, 576 aa, synthetic construct
  REGION 1..576: note = Description of Artificial Sequence: Synthetic polypeptide
GTSTEPSEGSAPGTSESATPESGPGSEPATSGSETPGSEPATSGSETPGSPAGSPTSTEEGTSESATPESGPGTSTEPSEGSAPGTSTEPSEGSAPGSPAGSPTSTEEGTSTEPSEGSAPGTSTEPSEGSAPGTSESATPESGPGTSTEPSEGSAPGTSESATPESGPGSEPATSGSETPGTSTEPSEGSAPGTSTEPSEGSAPGTSESATPESGPGTSESATPESGPGSPAGSPTSTEEGTSESATPESGPGSEPATSGSETPGTSESATPESGPGTSTEPSEGSAPGTSTEPSEGSAPGTSTEPSEGSAPGTSTEPSEGSAPGTSTEPSEGSAPGTSTEPSEGSAPGSPAGSPTSTEEGTSTEPSEGSAPGTSESATPESGPGSEPATSGSETPGTSESATPESGPGSEPATSGSETPGTSESATPESGPGTSTEPSEGSAPGTSESASPESGPGSPAGSPTSTEEGSPAGSPTSTEEGSPAGSPTSTEEGTSESATPESGPGTSTEPSEGSAPGTSESATPESGPGSEPATSGSETPGTSESATPESGPGSEPATSGSETPGTSESATPESGP

SEQ ID NO: 8018 - protein, 576 aa, synthetic construct
  REGION 1..576: note = Description of Artificial Sequence: Synthetic polypeptide
GSETPGSPAGSPTSTEEGTSESATPESGPGTSTEPSEGSAPGTSTEPSEGSAPGSPAGSPTSTEEGTSTEPSEGSAPGTSTEPSEGSAPGTSESATPESGPGTSTEPSEGSAPGTSESATPESGPGSEPATSGSETPGTSTEPSEGSAPGTSTEPSEGSAPGTSESATPESGPGTSESATPESGPGSPAGSPTSTEEGTSESATPESGPGSEPATSGSETPGTSESATPESGPGTSTEPSEGSAPGTSTEPSEGSAPGTSTEPSEGSAPGTSTEPSEGSAPGTSTEPSEGSAPGTSTEPSEGSAPGSPAGSPTSTEEGTSTEPSEGSAPGTSESATPESGPGSEPATSGSETPGTSESATPESGPGSEPATSGSETPGTSESATPESGPGTSTEPSEGSAPGTSESATPESGPGSPAGSPTSTEEGSPAGSPTSTEEGSPAGSPTSTEEGTSESATPESGPGTSTEPSEGSAPGTSESATPESGPGSEPATSGSTETGTSESATPESGPGSEPATSGSETPGTSESATPESGPGTSTEPSEGSAPGSPAGSPTSTEEGTSESATPESGPGSEPATS

SEQ ID NO: 8019 - protein, 576 aa, synthetic construct
  REGION 1..576: note = Description of Artificial Sequence: Synthetic polypeptide
EGSAPGTSTEPSEGSAPGTSESATPESGPGTSTEPSEGSAPGTSESATPESGPGSEPATSGSETPGTSTEPSEGSAPGTSTEPSEGSAPGTSESATPESGPGTSESATPESGPGSPAGSPTSTEEGTSESATPESGPGSEPATSGSETPGTSESATPESGPGTSTEPSEGSAPGTSTEPSEGSAPGTSTEPSEGSAPGTSTEPSEGSAPGTSTEPSEGSAPGTSTEPSEGSAPGSPAGSPTSTEEGTSTEPSEGSAPGTSESATPESGPGSEPATSGSETPGTSESATPESGPGSEPATSGSETPGTSESATPESGPGTSTEPSEGSAPGTSESATPESGPGSPAGSPTSTEEGSPAGSPTSTEEGSPAGSPTSTEEGTSESATPESGPGTSTEPSEGSAPGTSESATPESGPGSEPATSGSETPGTSESATPESGPGSEPATSGSETPGTSESASPESGPGTSTEPSEGSAPGSPAGSPTSTEEGTSESATPESGPGSEPATSGSETPGTSESATPESGPGSPAGSPTSTEEGSPAGSPTSTEEGTSTEPSEGSAPGTSESATPESGPGTSESAT

SEQ ID NO: 8020 - protein, 10 aa, synthetic construct
  REGION 1..10: note = Description of Artificial Sequence: Synthetic peptide
SPATSGSTPE

SEQ ID NO: 8021 - protein, 8 aa, synthetic construct
  REGION 1..8: note = Description of Artificial Sequence: Synthetic peptide
GSAPATSE

SEQ ID NO: 8022 - protein, 9 aa, synthetic construct
  REGION 1..9: note = Description of Artificial Sequence: Synthetic peptide
GSAPGTATE

SEQ ID NO: 8023 - protein, 7 aa, synthetic construct
  REGION 1..7: note = Description of Artificial Sequence: Synthetic peptide
GSAPGTE

SEQ ID NO: 8024 - protein, 8 aa, synthetic construct
  REGION 1..8: note = Description of Artificial Sequence: Synthetic peptide
PATSGPTE

SEQ ID NO: 8025 - protein, 5 aa, synthetic construct
  REGION 1..5: note = Description of Artificial Sequence: Synthetic peptide
SASPE

SEQ ID NO: 8026 - protein, 8 aa, synthetic construct
  REGION 1..8: note = Description of Artificial Sequence: Synthetic peptide
PATSGSTE

SEQ ID NO: 8027 - protein, 9 aa, synthetic construct
  REGION 1..9: note = Description of Artificial Sequence: Synthetic peptide
GSAPGTSAE

SEQ ID NO: 8028 - protein, 7 aa, synthetic construct
  REGION 1..7: note = Description of Artificial Sequence: Synthetic peptide
SATSGSE

SEQ ID NO: 8029 - protein, 9 aa, synthetic construct
  REGION 1..9: note = Description of Artificial Sequence: Synthetic peptide
SGPGSTPAE

SEQ ID NO: 8030 - protein, 4 aa, synthetic construct
  REGION 1..4: note = Description of Artificial Sequence: Synthetic peptide
SGSE

SEQ ID NO: 8031 - protein, 6 aa, synthetic construct
  REGION 1..6: note = Description of Artificial Sequence: Synthetic 6xHis tag
HHHHHH

SEQ ID NO: 8032 - protein, 8 aa, synthetic construct
  REGION 1..8: note = Description of Artificial Sequence: Synthetic 8xHis tag
HHHHHHHH

SEQ ID NO: 8033 - protein, 4 aa, synthetic construct
  REGION 1..4: note = Description of Artificial Sequence: Synthetic peptide
EPEA

SEQ ID NO: 8034 - protein, 11 aa, synthetic construct
  REGION 1..11: note = Description of Artificial Sequence: Synthetic peptide
RASQDIRNYLN

SEQ ID NO: 8035 - protein, 7 aa, synthetic construct
  REGION 1..7: note = Description of Artificial Sequence: Synthetic peptide
YTSRLES

SEQ ID NO: 8036 - protein, 9 aa, synthetic construct
  REGION 1..9: note = Description of Artificial Sequence: Synthetic peptide
QQGNTLPWT

SEQ ID NO: 8037 - protein, 10 aa, synthetic construct
  REGION 1..10: note = Description of Artificial Sequence: Synthetic peptide
GYSFTGYTMN

SEQ ID NO: 8038 - protein, 10 aa, synthetic construct
  REGION 1..10: note = Description of Artificial Sequence: Synthetic peptide
LINPYKGVST

SEQ ID NO: 8039 - protein, 13 aa, synthetic construct
  REGION 1..13: note = Description of Artificial Sequence: Synthetic peptide
SGYYGDSDWYFDV

SEQ ID NO: 8040 - protein, 119 aa, synthetic construct [sequence omitted]

SEQ ID NO: 8041 - protein, 122 aa, synthetic construct [sequence omitted]

SEQ ID NO: 8042 - protein, 119 aa, synthetic construct
  REGION 1..119: note = Description of Artificial Sequence: Synthetic polypeptide
QVQLVQSGGGVVQPGRSLRLSCKASGYTFTSYTMHWVRQAPGKGLEWIGYINPSSGYTKYNQKFKDRFTISADKSKSTAFLQMDSLRPEDTGVYFCARWQDYDVYFDYWGQGTPVTVSS

SEQ ID NO: 8043 - protein, 119 aa, synthetic construct [sequence omitted]

SEQ ID NO: 8044 - protein, 119 aa, synthetic construct
  REGION 1..119: note = Description of Artificial Sequence: Synthetic polypeptide
DIKLQQSGAELARPGASVKMSCKTSGYTFTRYTMHWVKQRPGQGLEWIGYINPSRGYTNYNQKFKDKATLTTDKSSSTAYMQLSSLTSEDSAVYYCARYYDDHYCLDYWGQGTTLTVSS

SEQ ID NO: 8045 - protein, 119 aa, synthetic construct
  REGION 1..119: note = Description of Artificial Sequence: Synthetic polypeptide
DVQLVQSGAEVKKPGASVKVSCKASGYTFTRYTMHWVRQAPGQGLEWIGYINPSRGYTNYADSVKGRFTITTDKSTSTAYMELSSLRSEDTATYYCARYYDDHYCLDYWGQGTTVTVSS

SEQ ID NO: 8046 - protein, 125 aa, synthetic construct
  REGION 1..125: note = Description of Artificial Sequence: Synthetic polypeptide
EVQLVESGGGLVQPGGSLKLSCAASGFTFNKYAMNWVRQAPGKGLEWVARIRSKYNNYATYYADSVKDRFTISRDDSKNTAYLQMNNLKTEDTAVYYCVRHGNFGNSYISYWAYWGQGTLVTVSS

SEQ ID NO: 8047 - protein, 125 aa, synthetic construct
  REGION 1..125: note = Description of Artificial Sequence: Synthetic polypeptide
EVQLVESGGGLVQPGGSLRLSCAASGFTFNTYAMNWVRQAPGKGLEWVGRIRSKYNNYATYYADSVKGRFTISRDDSKNTLYLQMNSLRAEDTAVYYCVRHGNFGNSYVSWFAYWGQGTLVTVSS

SEQ ID NO: 8048 - protein, 125 aa, synthetic construct
  REGION 1..125: note = Description of Artificial Sequence: Synthetic polypeptide
EVKLLESGGGLVQPKGSLKLSCAASGFTFNTYAMNWVRQAPGKGLEWVARIRSKYNNYATYYADSVKDRFTISRDDSQSILYLQMNNLKTEDTAMYYCVRHGNFGNSYVSWFAYWGQGTLVTVSS

SEQ ID NO: 8049 - protein, 107 aa, synthetic construct
  REGION 1..107: note = Description of Artificial Sequence: Synthetic polypeptide
DIQMTQSPSSLSASVGDRVTITCSASSSVSYMNWYQQTPGKAPKRWIYDTSKLASGVPSRFSGSGSGTDYTFTISSLQPEDIATYYCQQWSSNPFTFGQGTKLQITR

SEQ ID NO: 8050 - protein, 107 aa, synthetic construct [sequence omitted]

SEQ ID NO: 8051 - protein, 107 aa, synthetic construct
  REGION 1..107: note = Description of Artificial Sequence: Synthetic polypeptide
DIQMTQSPSSLSASVGDRVTMTCRASSSVSYMHWYQQTPGKAPKPWIYATSNLASGVPSRFSGSGSGTDYTLTISSLQPEDIATYYCQQWSSNPPTFGQGTKLQITR

SEQ ID NO: 8052 - protein, 107 aa, synthetic construct
  REGION 1..107: note = Description of Artificial Sequence: Synthetic polypeptide
QIVLTQSPAIMSASPGEKVTMTCSASSSVSYMNWYQQKSGTSPKRWIYDTSKLASGVPAHFRGSGSGTSYSLTISGMEAEDAATYYCQQWSSNPFTFGSGTKLEINR

SEQ ID NO: 8053 - protein, 106 aa, synthetic construct
  REGION 1..106: note = Description of Artificial Sequence: Synthetic polypeptide
DIQLTQSPAIMSASPGEKVTMTCRASSSVSYMNWYQQKSGTSPKRWIYDTSKVASGVPYRFSGSGSGTSYSLTISSMEAEDAATYYCQQWSSNPLTFGAGTKLELK

SEQ ID NO: 8054 - protein, 106 aa, synthetic construct
  REGION 1..106: note = Description of Artificial Sequence: Synthetic polypeptide
DIVLTQSPATLSLSPGERATLSCRASQSVSYMNWYQQKPGKAPKRWIYDTSKVASGVPARFSGSGSGTDYSLTINSLEAEDAATYYCQQWSSNPLTFGGGTKVEIK

SEQ ID NO: 8055 - protein, 109 aa, synthetic construct
  REGION 1..109: note = Description of Artificial Sequence: Synthetic polypeptide
QTVVTQEPSLTVSPGGTVTLTCGSSTGAVTSGYYPNWVQQKPGQAPRGLIGGTKFLAPGTPARFSGSLLGGKAALTLSGVQPEDEAEYYCALWYSNRWVFGGGTKLTVL

SEQ ID NO: 8056 - protein, 109 aa, synthetic construct
  REGION 1..109: note = Description of Artificial Sequence: Synthetic polypeptide
QAVVTQEPSLTVSPGGTVTLTCGSSTGAVTTSNYANWVQQKPGQAPRGLIGGTNKRAPGVPARFSGSLLGGKAALTLSGAQPEDEAEYYCALWYSNLWVFGGGTKLTVL

SEQ ID NO: 8057 - protein, 109 aa, synthetic construct
  REGION 1..109: note = Description of Artificial Sequence: Synthetic polypeptide
QAVVTQESALTTSPGETVTLTCRSSTGAVTTSNYANWVQEKPDHLFTGLIGGTNKRAPGVPARFSGSLIGDKAALTITGAQTEDEAIYFCALWYSNLWVFGGGTKLTVL

SEQ ID NO: 8058 - protein, 30 aa, synthetic construct
  REGION 1..30: note = Description of Artificial Sequence: Synthetic polypeptide
GSGEGSEGEGGGEGSEGEGSGEGGEGEGSG

SEQ ID NO: 8059 - protein, 32 aa, synthetic construct
  REGION 1..32: note = Description of Artificial Sequence: Synthetic polypeptide
TGSGEGSEGEGGGEGSEGEGSGEGGEGEGSGT

SEQ ID NO: 8060 - protein, 30 aa, synthetic construct
  REGION 1..30: note = Description of Artificial Sequence: Synthetic polypeptide
GATPPETGAETESPGETTGGSAESEPPGEG

SEQ ID NO: 8061 - protein, 30 aa, synthetic construct
  REGION 1..30: note = Description of Artificial Sequence: Synthetic polypeptide
GSAAPTAGTTPSASPAPPTGGSSAAGSPST

SEQ ID NO: 8062 - protein, 6 aa, synthetic construct
  REGION 1..6: note = Description of Artificial Sequence: Synthetic peptide
SGGGGS

SEQ ID NO: 8063 - protein, 5 aa, synthetic construct
  REGION 1..5: note = Description of Artificial Sequence: Synthetic peptide
GGGGS

SEQ ID NO: 8064 - protein, 6 aa, synthetic construct
  REGION 1..6: note = Description of Artificial Sequence: Synthetic peptide
GGSGGS

SEQ ID NO: 8065 - protein, 123 aa, synthetic construct [sequence omitted]

SEQ ID NO: 8066 - protein, 122 aa, synthetic construct
  REGION 1..122: note = Description of Artificial Sequence: Synthetic polypeptide
EVQLVESGGGLVQPGGSLRLSCAASGFTFSSYDIHWVRQATGKGLEWVSAIGPAGDTYYPGSVKGRFTISRENAKNSLYLQMNSLRAGDTAVYYCARGLITFGGLIAPFDYWGQGTLVTVSS

SEQ ID NO: 8067 - protein, 120 aa, synthetic construct
  REGION 1..120: note = Description of Artificial Sequence: Synthetic polypeptide
QVKLEQSGAEVVKPGASVKLSCKASGFNIKDSYMHWLRQGPGQRLEWIGWIDPENGDTEYAPKFQGKATFTTDTSANTAYLGLSSLRPEDTAVYYCNEGTPTGPYYFDYWGQGTLVTVSS

SEQ ID NO: 8068 - protein, 121 aa, synthetic construct
  REGION 1..121: note = Description of Artificial Sequence: Synthetic polypeptide
EVQLVESGGGLVQPGGSLRLSCAASGFNIKDTYMHWVRQAPGKGLEWVARIDPANGNSKYADSVKGRFTISADTSKNTAYLQMNSLRAEDTAVYYCAPFGYYVSDYAMAYWGQGTLVTVSS

SEQ ID NO: 8069 - protein, 121 aa, synthetic construct
  REGION 1..121: note = Description of Artificial Sequence: Synthetic polypeptide
EVQLVESGGGLVQPGGSLRLSCAASGFNIKDTYMHWVRQAPGKGLEWVARIDPANGNSKYVPKFQGRATISADTSKNTAYLQMNSLRAEDTAVYYCAPFGYYVSDYAMAYWGQGTLVTVSS

SEQ ID NO: 8070 - protein, 119 aa, synthetic construct
  REGION 1..119: note = Description of Artificial Sequence: Synthetic polypeptide
EVQLVESGGGVVQPGRSLRLSCSASGFDFTTYWMSWVRQAPGKGLEWIGEIHPDSSTINYAPSLKDRFTISRDNAKNTLFLQMDSLRPEDTGVYFCASLYFGFPWFAYWGQGTPVTVSS

SEQ ID NO: 8071 - protein, 121 aa, synthetic construct
  REGION 1..121: note = Description of Artificial Sequence: Synthetic polypeptide
EVKLVESGGGLVQPGGSLRLSCATSGFTFTDYYMNWVRQPPGKALEWLGFIGNKANGYTTEYSASVKGRFTISRDKSQSILYLQMNTLRAEDSATYYCTRDRGLRFYFDYWGQGTTLTVSS

SEQ ID NO: 8072 - protein, 121 aa, synthetic construct
  REGION 1..121: note = Description of Artificial Sequence: Synthetic polypeptide
EVQLVESGGGLVQPGRSLRLSCAASGFTVSSYWMHWVRQAPGKGLEWVGFIRNKANGGTTEYAASVKGRFTISRDDSKNTLYLQMNSLRAEDTAVYYCARDRGLRFYFDYWGQGTTVTVSS

SEQ ID NO: 8073 - protein, 124 aa, synthetic construct
  REGION 1..124: note = Description of Artificial Sequence: Synthetic polypeptide
QVQLQQSGAELVRPGSSVKISCKASGYAFSSYWMNWVKQRPGQGLEWIGQIWPGDGDTNYNGKFKGKATLTADESSSTAYMQLSSLASEDSAVYFCARRETTTVGRYYYAMDYWGQGTTVTVSS

SEQ ID NO: 8074 - protein, 122 aa, synthetic construct
  REGION 1..122: note = Description of Artificial Sequence: Synthetic polypeptide
EVQLVESGGGLVQPGRSLRLSCAASGFTFNDYAMHWVRQAPGKGLEWVSTISWNSGSIGYADSVKGRFTISRDNAKKSLYLQMNSLRAEDTALYYCAKDIQYGNYYYGMDVWGQGTTVTVSS

SEQ ID NO: 8075 - protein, 122 aa, synthetic construct
  REGION 1..122: note = Description of Artificial Sequence: Synthetic polypeptide
QAYLQQSGAELVRPGASVKMSCKASGYTFTSYNMHWVKQTPRQGLEWIGAIYPGNGDTSYNQKFKGKATLTVDKSSSTAYMQLSSLTSEDSAVYFCARVVYYSNSYWYFDVWGTGTTVTVSG

SEQ ID NO: 8076 - protein, 119 aa, synthetic construct
  REGION 1..119: note = Description of Artificial Sequence: Synthetic polypeptide
QVQLVQSGAEVKKPGSSVKVSCKASGYAFSYSWINWVRQAPGQGLEWMGRIFPGDGDTDYNGKFKGRVTITADKSTSTAYMELSSLRSEDTAVYYCARNVFDGYWLVYWGQGTLVTVSS

SEQ ID NO: 8077 - protein, 122 aa, synthetic construct [sequence omitted]

SEQ ID NO: 8078 - protein, 121 aa, synthetic construct [sequence omitted]

SEQ ID NO: 8079 - protein, 122 aa, synthetic construct [sequence omitted]

SEQ ID NO: 8080 - protein, 114 aa, synthetic construct
  REGION 1..114: note = Description of Artificial Sequence: Synthetic polypeptide
QLVQSGAEVKKPGSSVKVSCKASGYTITDSNIHWVRQAPGQSLEWIGYIYPYNGGTDYNQKFKNRATLTVDNPTNTAYMELSSLRSEDTDFYYCVNGNPWLAYWGQGTLVTVSS

SEQ ID NO: 8081 - protein, 122 aa, synthetic construct [sequence omitted]

SEQ ID NO: 8082 - protein, 118 aa, synthetic construct
  REGION 1..118: note = Description of Artificial Sequence: Synthetic polypeptide
QIQLVQSGPEVKKPGETVKISCKASGYTFTNYGMNWVKQAPGKGLKWMGWINTYTGEPTYADAFKGRFAFSLETSASTAYLQINNLKNEDTATYFCARDYGDYGMDYWGQGTSVTVSS

SEQ ID NO: 8083 - protein, 118 aa, synthetic construct
  REGION 1..118: note = Description of Artificial Sequence: Synthetic polypeptide
QVQLQQSGTELMTPGASVTMSCKTSGYTFSTYWIEWVKQRPGHGLEWIGEILGPSGYTDYNEKFKAKATFTADTSSNTAYMQLSSLASEDSAVYYCARWDRLYAMDYWGGGTSVTVSS

SEQ ID NO: 8084 - protein, 118 aa, synthetic construct
  REGION 1..118: note = Description of Artificial Sequence: Synthetic polypeptide
QVQLVESGGGVVQPGRSLRLSCAASGFTFSSYIMHWVRQAPGKGLEWVAVISYDGRNKYYADSVKGRFTISRDNSKNTLYLQMNSLRAEDTAVYYCARDTDGYDFDYWGQGTLVTVSS

SEQ ID NO: 8085 - protein, 119 aa, synthetic construct
  REGION 1..119: note = Description of Artificial Sequence: Synthetic polypeptide
QIQLVESGGGVVQPGRSLRLSCAASGFTFGYYAMHWVRQAPGKGLEWVAVISYDGSIKYYADSVKGRFTISRDNSKNTLYLQMNSLRAEDTAVYYCAREGPYSNYLDYWGQGTLVTVSS

SEQ ID NO: 8086 - protein, 118 aa, synthetic construct
  REGION 1..118: note = Description of Artificial Sequence: Synthetic polypeptide
QVQLVESGGGVVQPGRSLRLSCATSGFTFSDYGMHWVRQAPGKGLEWVAVIWYDGSNKYYADSVKGRFTISRDNSKKTLSLQMNSLRAEDTAVYYCARDSIMVRGDYWGQGTLVTVSS

SEQ ID NO: 8087 - protein, 118 aa, synthetic construct
  REGION 1..118: note = Description of Artificial Sequence: Synthetic polypeptide
QVQLVESGGGVVQPGRSLRLSCAASGFTFSDHGMHWVRQAPGKGLEWVAVIWYDGSNKYYADSVKGRFTISRDNSKNTLYLQMNSLRAEDTAVYYCARDSIMVRGDYWGQGTLVTVSS

SEQ ID NO: 8088 - protein, 122 aa, synthetic construct
  REGION 1..122: note = Description of Artificial Sequence: Synthetic polypeptide
QVQLQESGPGLVKPSETLSLTCTVSGGSVSSDYYYWSWIRQPPGKGLEWLGYIYYSGSTNYNPSLKSRVTISVDTSKNQFSLKLRSVTTADTAVYYCARGDGDYGGNCFDYWGQGTLVTVSS

SEQ ID NO: 8089 - protein, 117 aa, synthetic construct
  REGION 1..117: note = Description of Artificial Sequence: Synthetic polypeptide
QVQLVQSGAEVKKPGASVKVSCKASGYTFTSYGFSWVRQAPGQGLEWMGWISASNGNTYYAQKLQGRVTMTTDTSTSTAYMELRSLRSDDTAVYYCARVYADYADYWGQGTLVTVSS

SEQ ID NO: 8090 - protein, 115 aa, synthetic construct [sequence omitted]

SEQ ID NO: 8091 - protein, 119 aa, synthetic construct [sequence omitted]

SEQ ID NO: 8092 - protein, 125 aa, synthetic construct
  REGION 1..125: note = Description of Artificial Sequence: Synthetic polypeptide
QVQLVESGGGVVQPGRSLRLSCAASGFTFSSYGMHWVRQAPGKGLEWVAVIWYDGSNKYYADSVKGRFTISRDNSKNTLYLQMNSLRAEDTAVYYCARDPRGATLYYYYYGMDVWGQGTTVTVSS

SEQ ID NO: 8093 - protein, 118 aa, synthetic construct
  REGION 1..118: note = Description of Artificial Sequence: Synthetic polypeptide
QVQLVESGGGVVQPGRSLRLSCAASGFTFSSYTMHWVRQAPGKGLEWVTFISYDGNNKYYADSVKGRFTISRDNSKNTLYLQMNSLRAEDTAIYYCARTGWLGPFDYWGQGTLVTVSS

SEQ ID NO: 8094 - protein, 123 aa, synthetic construct
  REGION 1..123: note = Description of Artificial Sequence: Synthetic polypeptide
QVQLQESGPGLVKPSQTLSLTCTVSGGSISSGGYYWSWIRQHPGKGLEWIGIIYYSGSTYYNPSLKSRVTISVDTSKNQFSLKLNSVTAADTAVFYCARVAIVTTIPGGMDVWGQGTTVTVSS

SEQ ID NO: 8095 - protein, 120 aa, synthetic construct
  REGION 1..120: note = Description of Artificial Sequence: Synthetic polypeptide
EVQLLEQSGAELVRPGTSVKISCKASGYAFTNYWLGWVKQRPGHGLEWIGDIFPGSGNIHYNEKFKGKATLTADKSSSTAYMQLSSLTFEDSAVYFCARLRNWDEPMDYWGQGTTVTVSS

SEQ ID NO: 8096 - protein, 127 aa, synthetic construct
  REGION 1..127: note = Description of Artificial Sequence: Synthetic polypeptide
EVQLLESGGGVVQPGRSLRLSCAASGFTFSSYGMHWVRQAPGKGLEWVAVISYDGSNKYYADSVKGRFTISRDNSKNTLYLQMNSLRAEDTAVYYCAKDMGWGSGWRPYYYYGMDVWGQGTTVTVSS

SEQ ID NO: 8097 - protein, 116 aa, synthetic construct
  REGION 1..116: note = Description of Artificial Sequence: Synthetic polypeptide
QVQLQQSGAELVRPGTSVKVSCKASGYAFTNYLIEWVKQRPGQGLEWIGVINPGSGGTNYNEKFKGKATLTADKSSSTAYMQLSSLTSDDSAVYFCARDGPWFAYWGQGTLVTVSA

SEQ ID NO: 8098 - protein, 116 aa, synthetic construct
  REGION 1..116: note = Description of Artificial Sequence: Synthetic polypeptide
QIQLVQSGPELKKPGETVKISCKASGYTFTNYGMNWVRQAPGKGLKWMGWINTYTGEPTYADDFKGRFVFSLETSASTAFLQLNNLRSEDTATYFCVRFISKGDYWGQGTSVTVSS

SEQ ID NO: 8099 - protein, 114 aa, synthetic construct
  REGION 1..114: note = Description of Artificial Sequence: Synthetic polypeptide
VQLQQSDAELVKPGASVKISCKASGYTFTDHAIHWVKQNPEQGLEWIGYFSPGNDDFKYNERFKGKATLTADKSSSTAYVQLNSLTSEDSAVYFCTRSLNMAYWGQGTSVTVSS

SEQ ID NO: 8100 - protein, 116 aa, synthetic construct
  REGION 1..116: note = Description of Artificial Sequence: Synthetic polypeptide
EVQLVQSGPEVKKPGASVKVSCKASGYTFTNYGMNWVRQAPGQGLEWMGWINTYTGEPTYGEDFKGRFAFSLDTSASTAYMELSSLRSEDTAVYFCARFGNYVDYWGQGSLVTVSS

SEQ ID NO: 8101 - protein, 116 aa, synthetic construct
  REGION 1..116: note = Description of Artificial Sequence: Synthetic polypeptide
EVQLVQSGPGLVQPGGSVRISCAASGYTFTNYGMNWVKQAPGKGLEWMGWINTYTGESTYADSFKGRFTFSLDTSASAAYLQINSLRAEDTAVYYCARFAIKGDYWGQGTLLTVSS

SEQ ID NO: 8102 - protein, 128 aa, synthetic construct
  REGION 1..128: note = Description of Artificial Sequence: Synthetic polypeptide
EVQLLESGGGLVQPGGSLRLSCAASGFTFSHYMMAWVRQAPGKGLEWVSRIGPSGGPTHYADSVKGRFTISRDNSKNTLYLQMNSLRAEDTAVYYCAGYDSGYDYVAVAGPAEYFQHWGQGTLVTVSS

SEQ ID NO: 8103 - protein, 119 aa, synthetic construct
  REGION 1..119: note = Description of Artificial Sequence: Synthetic polypeptide
EVQLVESGGGVVQPGRSLRLSCSASGFTFSGYGLSWVRQAPGKGLEWVAMISSGGSYTYYADSVKGRFAISRDNAKNTLFLQMDSLRPEDTGVYFCARHGDDPAWFAYWGQGTPVTVSS

SEQ ID NO: 8104 - protein, 118 aa, synthetic construct
  REGION 1..118: note = Description of Artificial Sequence: Synthetic polypeptide
QVQLVQSGAEVVKPGASVKISCKASGYTFTGYFMNWVKQSPGQSLEWIGRIHPYDGDTFYNQKFQGKATLTVDKSSNTAHMELLSLTSEDFAVYYCTRYDGSRAMDYWGQGTTVTVSS

SEQ ID NO: 8105 - protein, 118 aa, synthetic construct; identical to SEQ ID NO: 8104
  REGION 1..118: note = Description of Artificial Sequence: Synthetic polypeptide

SEQ ID NO: 8106 - protein, 109 aa, synthetic construct
  REGION 1..109: note = Description of Artificial Sequence: Synthetic polypeptide
GPELVKPGASVKISCKASDYSFTGYFMNWVMQSHGKSLEWIGRIFPYNGDTFYNQKFKGRATLTVDKSSSTAHMELRSLASEDSAVYFCARGTHYFDYWGQGTTLTVSS

SEQ ID NO: 8107 - protein, 115 aa, synthetic construct
  REGION 1..115: note = Description of Artificial Sequence: Synthetic polypeptide
QVQLVQSGAEVKKPGASVKVSCKASGYTFTDYEMHWVRQAPGQGLEWMGALDPKTGDTAYSQKFKGRVTLTADKSTSTAYMELSSLTSEDTAVYYCTRFYSYTYWGQGTLVTVSS

SEQ ID NO: 8108 - protein, 117 aa, synthetic construct
  REGION 1..117: note = Description of Artificial Sequence: Synthetic polypeptide
EVQLVQSGAEVKKPGESLKISCKGSGYSFTSYWIAWVRQMPGKGLEWMGIIFPGDSDTRYSPSFQGQVTISADRSIRTAYLQWSSLKASDTALYYCARTREGYFDYWGQGTLVTVSS

SEQ ID NO: 8109 - protein, 117 aa, synthetic construct
  REGION 1..117: note = Description of Artificial Sequence: Synthetic polypeptide
EVQLVQSGAEVKKPGESLKISCKGSGYSFTNYWIAWVRQMPGKGLEWMGIIYPGDSDTRYSPSFQGQVTISADKSIRTAYLQWSSLKASDTAMYYCARTREGYFDYWGQGTLVTVSS

SEQ ID NO: 8110 - protein, 117 aa, synthetic construct
  REGION 1..117: note = Description of Artificial Sequence: Synthetic polypeptide
EVQLVQSGADVTKPGESLKISCKVSGYRFTNYWIGWMRQMSGKGLEWMGIIYPGDSDTRYSPSFQGHVTISADKSINTAYLRWSSLKASDTAIYYCARTREGFFDYWGQGTPVTVSS

SEQ ID NO: 8111 - protein, 124 aa, synthetic construct
  REGION 1..124: note = Description of Artificial Sequence: Synthetic polypeptide
QVQLVESGGGVVQSGRSLRLSCAASGFTFRNYGMHWVRQAPGKGLEWVAVIWYDGSDKYYADSVRGRFTISRDNSKNTLYLQMNSLRAEDTAVYYCARDGYDILTGNPRDFDYWGQGTLVTVSS

SEQ ID NO: 8112 - protein, 119 aa, synthetic construct
  REGION 1..119: note = Description of Artificial Sequence: Synthetic polypeptide
QVQLKQSGPGLVQPSQSLSITCTVSGFSLTNYGVHWVRQSPGKGLEWLGVIWSGGNTDYNTPFTSRLSINKDNSKSQVFFKMNSLQSNDTAIYYCARALTYYDYEFAYWGQGTLVTVSA

SEQ ID NO: 8113 - protein, 120 aa, synthetic construct [sequence omitted]

SEQ ID NO: 8114 - protein, 125 aa, synthetic construct [sequence omitted]

SEQ ID NO: 8115 - protein, 121 aa, synthetic construct [sequence omitted]

SEQ ID NO: 8116 - protein, 121 aa, synthetic construct
  REGION 1..121: note = Description of Artificial Sequence: Synthetic polypeptide
QVQLVQSGAEVKKPGSSVKVSCKASGGTFSSYAISWVRQAPGQGLEWMGSIIPIFGTVNYAQKFQGRVTITADESTSTAYMELSSLRSEDTAVYYCARDPSVNLYWYFDLWGRGTLVTVSS

SEQ ID NO: 8117 - protein, 119 aa, synthetic construct
  REGION 1..119: note = Description of Artificial Sequence: Synthetic polypeptide
QVQLVQSGAEVKKPGSSVKVSCKASGGTFGSYAISWVRQAPGQGLEWMGSIIPIFGAANPAQKSQGRVTITADESTSTAYMELSSLRSEDTAVYYCAKMGRGKVAFDIWGQGTMVTVSS

SEQ ID NO: 8118 - protein, 123 aa, synthetic construct
  REGION 1..123: note = Description of Artificial Sequence: Synthetic polypeptide
QVQLVQSGAEVKKPGASVKVSCKASGYAFTSYGINWVRQAPGQGLEWMGWISAYNGNTYYAQKLRGRVTMTTDTSTSTAYMELRSLRSDDTAVYYCARDLGGYGSGSVPFDPWGQGTLVTVSS

SEQ ID NO: 8119 - protein, 123 aa, synthetic construct [sequence omitted]

SEQ ID NO: 8120 - protein, 119 aa, synthetic construct [sequence omitted]

SEQ ID NO: 8121 - protein, 118 aa, synthetic construct
  REGION 1..118: note = Description of Artificial Sequence: Synthetic polypeptide
QIQLVQSGPELKKPGETVKISCKASGYTFTEYPIHWVKQAPGKGFKWMGMIYTDIGKPTYAEEFKGRFAFSLETSASTAYLQINNLKNEDTATYFCVRDRYDSLFDYWGQGTTLTVSS

SEQ ID NO: 8122 - protein, 121 aa, synthetic construct
  REGION 1..121: note = Description of Artificial Sequence: Synthetic polypeptide
EMQLVESGGGFVKPGGSLKLSCAASGFAFSHYDMSWVRQTPKQRLEWVAYIASGGDITYYADTVKGRFTISRDNAQNTLYLQMSSLKSEDTAMFYCSRSSYGNNGDALDFWGQGTSVTVSS

SEQ ID NO: 8123 - protein, 119 aa, synthetic construct
  REGION 1..119: note = Description of Artificial Sequence: Synthetic polypeptide
QVQLVESGGGLVQPGGSLRLSCAASGFTFSSYAMGWVRQAPGKGLEWVSSISGSSRYIYYADSVKGRFTISRDNSKNTLYLQMNSLRAEDTAVYYCAKMDASGSYFNFWGQGTLVTVSS

SEQ ID NO: 8124 - protein, 115 aa, synthetic construct
  REGION 1..115: note = Description of Artificial Sequence: Synthetic polypeptide
QVQLLQSAAEVKKPGESLKISCKGSGYSFTSYWIGWVRQMPGKGLEWMGIIYPGDSDTRYSPSFQGQVTISADKSISTAYLQWSSLKASDTAVYYCARWRDSPLWGQGTLVTVSS

SEQ ID NO: 8125 - protein, 120 aa, synthetic construct [sequence omitted]

SEQ ID NO: 8126 - protein, 120 aa, synthetic construct
  REGION 1..120: note = Description of Artificial Sequence: Synthetic polypeptide
QVQLQQSGPELVKPGASLKLSCTASGFNIKDTYIHWVKQRPEQGLEWIGRIYPTNGYTRYDPKFQDKATITADTSSNTAYLQVSRLTSEDTAVYYCSRWGGDGFYAMDYWGQGASVTVSS

SEQ ID NO: 8127 - protein, 119 aa, synthetic construct
  REGION 1..119: note = Description of Artificial Sequence: Synthetic polypeptide
QVQLVESGGGLVQPGGSLRLSCAASGFTFRSYAMSWVRQAPGKGLEWVSAISGRGDNTYYADSVKGRFTISRDNSKNTLYLQMNSLRAEDTAVYYCAKMTSNAFAFDYWGQGTLVTVSS

SEQ ID NO: 8128 - protein, 119 aa, synthetic construct [sequence omitted]

SEQ ID NO: 8129 - protein, 119 aa, synthetic construct [sequence omitted]

SEQ ID NO: 8130 - protein, 121 aa, synthetic construct [sequence omitted]

SEQ ID NO: 8131 - protein, 118 aa, synthetic construct
  REGION 1..118: note = Description of Artificial Sequence: Synthetic polypeptide
QVQLQESGGGLVKPGGSLRLSCAASGFTFSSYWMSWVRQAPGKGLEWVANINRDGSASYYVDSVKGRFTISRDDAKNSLYLQMNSLRAEDTAVYYCARDRGVGYFDLWGRGTLVTVSS

SEQ ID NO: 8132 - protein, 129 aa, synthetic construct
  REGION 1..129: note = Description of Artificial Sequence: Synthetic polypeptide
QVQLVQSGAEVKKPGESLKISCKGSGYSFTSYWIAWVRQMPGKGLEYMGLIYPGDSDTKYSPSFQGQVTISVDKSVSTAYLQWSSLKPSDSAVYFCARHDVGYCTDRTCAKWPEWLGVWGQGTLVTVSS

SEQ ID NO: 8133 - protein, 119 aa, synthetic construct
  REGION 1..119: note = Description of Artificial Sequence: Synthetic polypeptide
EVQLVESGGGVVQPGRSLRLSCSTSGFTFSDYYMYWVRQAPGKGLEWVAYMSNVGAITDYPDTVKGRFTISRDNSKNTLFLQMDSLRPEDTGVYFCARGTRDGSWFAYWGQGTPVTVSS

SEQ ID NO: 8134 - protein, 120 aa, synthetic construct
  REGION 1..120: note = Description of Artificial Sequence: Synthetic polypeptide
QVELVQSGAEVKKPGESLKISCKGSGYSFTSYWIGWVRQAPGKGLEWMGIIDPGDSRTRYSPSFQGQVTISADKSISTAYLQWSSLKASDTAMYYCARGQLYGGTYMDGWGQGTLVTVSS

SEQ ID NO: 8135 - protein, 119 aa, synthetic construct
  REGION 1..119: note = Description of Artificial Sequence: Synthetic polypeptide
QVQLQQSGPELEKPGASVKISCKASGYSFTGYTMNWVKQSHGKSLEWIGLITPYNGASSYNQKFRGKATLTVDKSSSTAYMDLLSLTSEDSAVYFCARGGYDGRGFDYWGQGTTVTVSS

SEQ ID NO: 8136 - protein, 122 aa, synthetic construct
  REGION 1..122: note = Description of Artificial Sequence: Synthetic polypeptide
QVYLVESGGGVVQPGRSLRLSCAASGITFSIYGMHWVRQAPGKGLEWVAVIWYDGSHEYYADSVKGRFTISRDNSKNTLYLLMNSLRAEDTAVYYCARDGDYYDSGSPLDYWGQGTLVTVSS

SEQ ID NO: 8137 - protein, 122 aa, synthetic construct
  REGION 1..122: note = Description of Artificial Sequence: Synthetic polypeptide
QVHLVESGGGVVQPGRSLRLSCVASGITFRIYGMHWVRQAPGKGLEWVAVLWYDGSHEYYADSVKGRFTISRDNSKNTLYLQMNSLRAEDTAIYYCARDGDYYDSGSPLDYWGQGTLVTVSS

SEQ ID NO: 8138 - protein, 131 aa, synthetic construct
  REGION 1..131: note = Description of Artificial Sequence: Synthetic polypeptide
EVHLVESGGGLVQPGGSLRLSCAASGFTFSRYWMSWVRQAQGKGLEWVASIKQAGSEKTYVDSVKGRFTISRDNAKNSLSLQMNSLRAEDTAVYYCAREGAYYYDSASYYPYYYYYSMDVWGQGTTVTVSS

SEQ ID NO: 8139 - protein, 119 aa, synthetic construct
  REGION 1..119: note = Description of Artificial Sequence: Synthetic polypeptide
QVQLQQSGPELEKPGASVKISCKASGYSFTGYTMNWVKQSHGKSLEWIGLITPYNGASSYNQKFRGKATLTVDKSSSTAYMDLLSLTSEDSAVYFCARGGYDGRGFDYWGSGTPVTVSS

SEQ ID NO: 8140 - protein, 119 aa, synthetic construct
  REGION 1..119: note = Description of Artificial Sequence: Synthetic polypeptide
EVQLQESGPELVKPGASVKMSCKASGYTFPSYVLHWVKQKPGQGLEWIGYINPYNDGTQYNEKFKGKATLTSDKSSSTAYMELSRLTSEDSAVYYCARGFGGSYGFAYWGQGTLITVSA

SEQ ID NO: 8141 - protein, 119 aa, synthetic construct
  REGION 1..119: note = Description of Artificial Sequence: Synthetic polypeptide
QVQLQQSGAEVKKFGASVKVSCEASGYTFPSYVLHWVKQAPGQGLEWIGYINPYNDGTQTNKKFKGKATLTRDTSINTAYMELSRLRSDDTAVYYCARGFGGSYGFAYNGQGTLVTVSS

SEQ ID NO: 8142 - protein, 117 aa, synthetic construct
  REGION 1..117: note = Description of Artificial Sequence: Synthetic polypeptide
QAQLQVSGAEVVKPGASVKMSCKASGYTFTSYNMHWVKQTPGQGLEWIGYIYPGNGATNYNQKFQGKATLTADTSSSTAYMQISSLTSEDSAVYFCARGDSVPFAYWGQGTLVTVSA

SEQ ID NO: 8143 - protein, 118 aa, synthetic construct
  REGION 1..118: note = Description of Artificial Sequence: Synthetic polypeptide
QVQLQQSGAELMKPGASVKISCKATGYTFSAYWIEWVKQRPGHGLEWIGEILPGSNNSRYNEKFKGKATFTADTSSNTAYMQLSSLTSEDSAVYYCSRSYDFAWFAYWGQGTPVTVSA

SEQ ID NO: 8144 - protein, 118 aa, synthetic construct
  REGION 1..118: note = Description of Artificial Sequence: Synthetic polypeptide
QVQLVQSGAEVKKPGASVKVSCKASGYTFSAYWIEWVRQAPGKGLEWVGEILPGSNNSRYNEKFKGRVTVTRDTSTNTAYMELSSLRSEDTAVYYCARSYDFAWFAYWGQGTLVTVSS

SEQ ID NO: 8145 - protein, 123 aa, synthetic construct
  REGION 1..123: note = Description of Artificial Sequence: Synthetic polypeptide
QVQLVQSGAEVKKPGSSVKVSCKTSGDTFSTYAISWVRQAPGQGLEWMGGIIPIFGKAHYAQKFQGRVTITADESTSTAYMELSSLRSEDTAVYFCARKFHFVSGSPFGMDVWGQGTTVTVSS

SEQ ID NO: 8146 - protein, 121 aa, synthetic construct
  REGION 1..121: note = Description of Artificial Sequence: Synthetic polypeptide
EVQLVESGGGLVQPGGSLRLSCAASGFTFSRYWMSWVRQAPGKGLEWVANIKQDGSEKYYVDSVKGRFTISRDNAKNSLYLQMNSLRAEDTAVYYCAREGGWFGELAFDYWGQGTLVTVSS

SEQ ID NO: 8147 - protein, 118 aa, synthetic construct [sequence omitted]

SEQ ID NO: 8148 - protein, 120 aa, synthetic construct
  REGION 1..120: note = Description of Artificial Sequence: Synthetic polypeptide
EVQLLESGGGLVQPGGSLRLSCAASGFTFSSYIMMWVRQAPGKGLEWVSSIYPSGGITFYADTVKGRFTISRDNSKNTLYLQMNSLRAEDTAVYYCARIKLGTVTTVDYWGQGTLVTVSS

SEQ ID NO: 8149 - protein, 115 aa, synthetic construct
  REGION 1..115: note = Description of Artificial Sequence: Synthetic polypeptide
EVQLVQSGPEVKKPGATVKISCKTSGYTFTEYTIHWVKQAPGKGLEWIGNINPNNGGTTYNQKFEDKATLTVDKSTDTAYMELSSLRSEDTAVYYCAAGWNFDYWGQGTLLTVSS

SEQ ID NO: 8150 - protein, 121 aa, synthetic construct
  REGION 1..121: note = Description of Artificial Sequence: Synthetic polypeptide
QVQLVESGGGLVKPGESLRLSCAASGFTFSDYYMYWVRQAPGKGLEWVAIISDGGYYTYYSDIIKGRFTISRDNAKNSLYLQMNSLKAEDTAVYYCARGFPLLRHGAMDYWGQGTLVTVSS

SEQ ID NO: 8151 - protein, 121 aa, synthetic construct
  REGION 1..121: note = Description of Artificial Sequence: Synthetic polypeptide
QEQLVESGGRLVTPGGSLTLSCKASGFDFSAYYMSWVRQAPGKGLEWIATIYPSSGKTYYATWVNGRFTISSDNAQNTVDLQMNSLTAADRATYFCARDSYADDGALFNIWGPGTLVTISS

SEQ ID NO: 8152 - protein, 119 aa, synthetic construct
  REGION 1..119: note = Description of Artificial Sequence: Synthetic polypeptide
EVKLVESGGGLVKPGGSLKLSCAASGFTFSSYAMSWVRQIPEKRLEWVASISRGGTTYYPDSVKGRFTISRDNVRNILYLQMSSLRSEDTAMYYCGRYDYDGYYAMDYWGQGTSVTVSS

SEQ ID NO: 8153 - protein, 117 aa, synthetic construct
  REGION 1..117: note = Description of Artificial Sequence: Synthetic polypeptide
QSLEESGGRLVTPGTPLTLTCTVSGIDLNSHWMSWVRQAPGKGLEWIGIIAASGSTYYANWAKGRFTISKTSTTVDLRIASPTTEDTATYFCARDYGDYRLVTFNIWGPGTLVTVSS

SEQ ID NO: 8154 - protein, 116 aa, synthetic construct
  REGION 1..116: note = Description of Artificial Sequence: Synthetic polypeptide
QSVKESEGDLVTPAGNLTLTCTASGSDINDYPISWVRQAPGKGLEWIGFINSGGSTWYASWVKGRFTISRTSTTVDLKMTSLTTDDTATYFCARGYSTYYCDFNIWGPGTLVTISS

SEQ ID NO: 8155 - protein, 115 aa, synthetic construct
  REGION 1..115: note = Description of Artificial Sequence: Synthetic polypeptide
QVQLVQSGAEVVKPGASVKISCKASGYTFTDHAIHWVKQNPGQRLEWIGYFSPGNDDFKYNERFKGKATLTADTSASTAYVELSSLRSEDTAVYFCTRSLNMAYWGQGTLVTVSS

SEQ ID NO: 8156 - protein, 119 aa, synthetic construct
  REGION 1..119: note = Description of Artificial Sequence: Synthetic polypeptide
  MOD_RES 68: note = Any amino acid
QIQLVQSGPELKKPGETVKISCKASGYTFTNFGMNWVKQGPGEGLKWMGWINTNTGEPRYAEEFKGRXAFSLETTASTAYLQINNLKNEDTATYFCARDWDGAYFFDYWGQGTTLTVSS

SEQ ID NO: 8157 - protein, 117 aa, synthetic construct
  REGION 1..117: note = Description of Artificial Sequence: Synthetic polypeptide
QVQLQQSRPELVKPGASVKMSCKASGYTFTDYVISWVKQRTGQGLEWIGEIYPGSNSIYYNEKFKGRATLTADKSSSTAYMQLSSLTSEDSAVYFCAMGGNYGFDYWGQGTTLTVSS

SEQ ID NO: 8158 - protein, 122 aa, synthetic construct
  REGION 1..122: note = Description of Artificial Sequence: Synthetic polypeptide
  MOD_RES 97: note = Any amino acid
EVQLVESGGGLVQPKGSLKLSCAASGFTFNTYAMNWVRQAPGKGLEWVARIRSKSNNYATYYADSVKDRFTISRDDSQSMLYLQMNNLKTEDTAMYXCVRQWDYDVRAMNYWGQGTSVTVSS

SEQ ID NO: 8159 - protein, 121 aa, synthetic construct
  REGION 1..121: note = Description of Artificial Sequence: Synthetic polypeptide
QVQLQQSGSELKKPGASVKVSCKASGYTFTNYGMNWVKQAPGQGLKWMGWINTYTGEPTYTDDFKGRFAFSLDTSVSTAYLQISSLKADDTAVYFCARGGFGSSYWYFDVWGQGSLVTVSS

SEQ ID NO: 8160 - protein, 126 aa, synthetic construct
  REGION 1..126: note = Description of Artificial Sequence: Synthetic polypeptide
QAQVVESGGGVVQSGRSLRLSCAASGFAFSSYGMHWVRQAPGKGLEWVAVIWYDGSNKYYADSVRGRFTISRDNSENTLYLQMNSLRAEDTAVYYCARDHYGSGVHHYFYYGLDVWGQGTTVTVSS

SEQ ID NO: 8161 - protein, 117 aa, synthetic construct
  REGION 1..117: note = Description of Artificial Sequence: Synthetic polypeptide
EVQLVQSGGGLVKPGGSLRLSCAASGFTFSSYSMNWVRQAPGKGLEWVSSISSSSSYIYYADSVKGRFTISRDNAKNSLYLQMNSLRAEDTAVYYCARVTDAFDIWGQGTMVTVSSA

SEQ ID NO: 8162 - protein, 117 aa, synthetic construct
  REGION 1..117: note = Description of Artificial Sequence: Synthetic polypeptide
EVQLVESGGGLVQPGGSLRLSCAASGFTFSSYGMSWVRQAPGKGLEWVATITSGGSYTYYVDSVKGRFTISRDNAKNTLYLQMNSLRAEDTAVYYCVRIGEDALDYWGQGTLVTVSS

SEQ ID NO: 8163 - protein, 118 aa, synthetic construct
  REGION 1..118: note = Description of Artificial Sequence: Synthetic polypeptide
KVQLQQSGTELVKPGASVKVSCKASGYIFTEYIIHWVKQRSGQGLEWIGWLYPESNIIKYNEKFKDKATLTADKSSSTVYMELSRLTSEDSAVYFCTRHDGTNFDYWGQGTTLTVSSA

SEQ ID NO: 8164 - protein, 106 aa, synthetic construct [sequence omitted]

SEQ ID NO: 8165 - protein, 107 aa, synthetic construct
  REGION 1..107: note = Description of Artificial Sequence: Synthetic polypeptide
EIVLTQSPGTLSLSPGERATLSCRASQSVSSTYLAWYQQKPGQAPRLLIYGASSRATGIPDRFSGSGSGTDFTLTISRLEPEDFAVYYCQHYDNSQTFGQGTKVEIK

SEQ ID NO: 8166 - protein, 106 aa, synthetic construct
  REGION 1..106: note = Description of Artificial Sequence: Synthetic polypeptide
ENVLTQSPSSMSASVGDRVNIACSASSSVSYMHWFQQKPGKSPKLWIYSTSNLASGVPSRFSGSGSGTDYSLTISSMQPEDAATYYCQQRSSYPLTFGGGTKLEIK

SEQ ID NO: 8167 - protein, 111 aa, synthetic construct
  REGION 1..111: note = Description of Artificial Sequence: Synthetic polypeptide
DIQLTQSPSSLSASVGDRVTITCRAGESVDIFGVGFLHWYQQKPGKAPKLLIYRASNLESGVPSRFSGSGSRTDFTLTISSLQPEDFATYYCQQTNEDPYTFGQGTKVEIK

SEQ ID NO: 8168 - protein, 106 aa, synthetic construct
  REGION 1..106: note = Description of Artificial Sequence: Synthetic polypeptide
DIQLTQSPSSLSASVGDRVTITCKASQDVGTSVAWYQQKPGKAPKLLIYWTSTRHTGVPSRFSGSGSGTDFTFTISSLQPEDIATYYCQQYSLYRSFGQGTKVEIK

SEQ ID NO: 8169 - protein, 107 aa, synthetic construct
  REGION 1..107: note = Description of Artificial Sequence: Synthetic polypeptide
QTVLSQSPAILSASPGEKVTMTCRASSSVTYIHWYQQKPGSSPKSWIYATSNLASGVPARFSGSGSGTSYSLTISRVEAEDAATYYCQHWSSKPPTFGGGTKLEIKR

SEQ ID NO: 8170 - protein, 116 aa, synthetic construct
  REGION 1..116: note = Description of Artificial Sequence: Synthetic polypeptide
QAVLTQPASLSASPGASASLTCTLRRGINVGAYSIYWYQQKPGSPPQYLLRYKSDSDKQQGSGVSSRFSASKDASANAGILLISGLQSEDEADYYCMIWHSGASAVFGGGTKLTVL

SEQ ID NO: 8171 - protein, 111 aa, synthetic construct
  REGION 1..111: note = Description of Artificial Sequence: Synthetic polypeptide
DIQLTQSPASLAVSLGQRATISCKASQSVDYDGDSYLNWYQQIPGQPPKLLIYDASNLVSGIPPRFSGSGSGTDFTLNIHPVEKVDAATYHCQQSTEDPWTFGGGTKLEIK

SEQ ID NO: 8172 - protein, 107 aa, synthetic construct
  REGION 1..107: note = Description of Artificial Sequence: Synthetic polypeptide
EIVLTQSPATLSLSPGERATLSCRASQSVSSYLAWYQQKPGQAPRLLIYDASNRATGIPARFSGSGSGTDFTLTISSLEPEDFAVYYCQQRSNWPITFGQGTRLEIK

SEQ ID NO: 8173 - protein, 106 aa, synthetic construct [sequence omitted]

SEQ ID NO: 8174 - protein, 112 aa, synthetic construct
  REGION 1..112: note = Description of Artificial Sequence: Synthetic polypeptide
DIVMTQTPLSLPVTPGEPASISCRSSKSLLHSNGITYLYWYLQKPGQSPQLLIYQMSNLVSGVPDRFSGSGSGTDFTLKISRVEAEDVGVYYCAQNLELPYTFGGGTKVEIK

SEQ ID NO: 8175 - protein, 106 aa, synthetic construct [sequence omitted]

SEQ ID NO: 8176 - protein, 106 aa, synthetic construct [sequence omitted]

SEQ ID NO: 8177 - protein, 111 aa, synthetic construct [sequence omitted]

SEQ ID NO: 8178 - protein, 107 aa, synthetic construct [sequence omitted]

SEQ ID NO: 8179 - protein, 111 aa, synthetic construct
  REGION 1..111: note = Description of Artificial Sequence: Synthetic polypeptide
DIVLTQSPASLAVSLGQRATISCRASKSVSTSGYSFMHWYQQKPGQPPKLLIYLASNLESGVPARFSGSGSGTDFTLNIHPVEEEDAATYYCQHSREVPWTFGGGTKLEIK

SEQ ID NO: 8180 - protein, 111 aa, synthetic construct
  REGION 1..111: note = Description of Artificial Sequence: Synthetic polypeptide
DIVLTQSPASLTVSLGQKTTISCRASKSVSTSGYSFMHWYQLKPGQSPKLLIYLASDLPSGVPARFSGSGSGTDFTLKIHPVEEEDAATYYCQHSREIPYTFGGGTKLEIT

SEQ ID NO: 8181 - protein, 107 aa, synthetic construct
  REGION 1..107: note = Description of Artificial Sequence: Synthetic polypeptide
EIVLTQSPATLSLSPGERATLSCRASQSVSSYLAWYQQKPGQAPRLLIYDASNRATGIPARFSGSGSGTDFTLTISSLEPEDFAVYYCQQRTNWPLTFGGGTKVEIK

SEQ ID NO: 8182 - protein, 107 aa, synthetic construct
  REGION 1..107: note = Description of Artificial Sequence: Synthetic polypeptide
AIQLTQSPSSLSASVGDRVTITCRASQGISSALAWYQQKPGKAPKFLIYDASSLESGVPSRFSGSGSGTDFTLTISSLQPEDFATYYCQQFNSYPFTFGPGTKVDIK

SEQ ID NO: 8183 - protein, 107 aa, synthetic construct
  REGION 1..107: note = Description of Artificial Sequence: Synthetic polypeptide
DIQMTQSPSSLSASVGDRVTITCRASQGISSWLAWYQQKPEKAPKSLIYAASSLQSGVPSRFSGSGSGTDFTLTISSLQPEDFATYYCQQYNSYPLTFGGGTKVEIK

SEQ ID NO: 8184 - protein, 107 aa, synthetic construct
  REGION 1..107: note = Description of Artificial Sequence: Synthetic polypeptide
EIVLTQSPATLSLSPGERATLSCRASQSVSSYLAWYQQKPGQAPRLLIFDASNRATGIPARFSGSGSGTDFTLTISSLEPEDFAVYYCQQRSNWPLTFGGGTKVEIK

SEQ ID NO: 8185 - protein, 107 aa, synthetic construct
  REGION 1..107: note = Description of Artificial Sequence: Synthetic polypeptide
DIQMTQSPSSVSASVGDRVTITCRASQGINTWLAWYQQKPGKAPKLLIYAASSLKSGVPSRFSGSGSGTDFTLTISSLQPEDFATYYCQQANSFPLTFGGGTKVEIK

SEQ ID NO: 8186 - protein, 108 aa, synthetic construct [sequence omitted]

SEQ ID NO: 8187 - protein, 113 aa, synthetic construct [sequence omitted]

SEQ ID NO: 8188 - protein, 107 aa, synthetic construct
  REGION 1..107: note = Description of Artificial Sequence: Synthetic polypeptide
DIQMTQSPSSLSASVGDRVTITCRASQSINSYLDWYQQKPGKAPKLLIYAASSLQSGVPSRFSGSGSGTDFTLTISSLQPEDFATYYCQQYYSTPFTFGPGTKVEIK

SEQ ID NO: 8189 - protein, 108 aa, synthetic construct
  REGION 1..108: note = Description of Artificial Sequence: Synthetic polypeptide
EIVLTQSPGTLSLSPGERATLSCRASQSVGSSYLAWYQQKPGQAPRLLIYGAFSRATGIPDRFSGSGSGTDFTLTISRLEPEDFAVYYCQQYGSSPWTFGQGTKVEIK

SEQ ID NO: 8190 - protein, 107 aa, synthetic construct
  REGION 1..107: note = Description of Artificial Sequence: Synthetic polypeptide
EIVLTQSPDFQSVTPKEKVTITCRASQSIGISLHWYQQKPDQSPKLLIKYASQSFSGVPSRFSGSGSGTDFTLTINSLEAEDAATYYCHQSRSFPWTFGQGTKVEIK

SEQ ID NO: 8191 - protein, 113 aa, synthetic construct
  REGION 1..113: note = Description of Artificial Sequence: Synthetic polypeptide
ELVMTQSPSSLTVTAGEKVTMSCKSSQSLLNSGNQKNYLTWYQQKPGQPPKLLIYWASTRESGVPDRFTGSGSGTDFTLTISSVQAEDLAVYYCQNDYSYPLTFGAGTKLEIK

SEQ ID NO: 8192 - protein, 107 aa, synthetic construct
  REGION 1..107: note = Description of Artificial Sequence: Synthetic polypeptide
ELQMTQSPSSLSASVGDRVTITCRTSQSISSYLNWYQQKPGQPPKLLIYWASTRESGVPDRFSGSGSGTDFTLTISSLQPEDSATYYCQQSYDIPYTFGQGTKLEIK

SEQ ID NO: 8193 - protein, 107 aa, synthetic construct
  REGION 1..107: note = Description of Artificial Sequence: Synthetic polypeptide
NIVMTQSPKSMSMSVGERVTLTCKASENVVTYVSWYQQKPEQSPKLLIYGASNRYTGVPDRFTGSGSATDFTLTISSVQAEDLADYHCGQGYSYPYTFGGGTKLEIK

SEQ ID NO: 8194 - protein, 106 aa, synthetic construct
  REGION 1..106: note = Description of Artificial Sequence: Synthetic polypeptide
QILLTQSPAIMSASPGEKVTMTCSASSSVSYMLWYQQKPGSSPKPWIFDTSNLASGFPARFSGSGSGTSYSLIISSMEAEDAATYYCHQRSGYPYTFGGGTKLEIK

SEQ ID NO: 8195 - protein, 113 aa, synthetic construct
  REGION 1..113: note = Description of Artificial Sequence: Synthetic polypeptide
DIVMTQSPDSLAVSLGERATINCKSSQSVLYSSNNKNYLAWYQQKPGQPPKLLIYWASTRESGVPDRFSGSGSGTDFTLTISSLQAEDVAVYYCQQYYSYPLTFGGGTKVKES

SEQ ID NO: 8196 - protein, 112 aa, synthetic construct
  REGION 1..112: note = Description of Artificial Sequence: Synthetic polypeptide
DIVMTQSPLSLPVTPGEPASISCRSSINKKGSNGITYLYWYLQKPGQSPQLLIYQMSNLASGVPDRFSGSGSGTDFTLKISRVEAEDVGVYYCAQNLEIPRTFGQGTKVEIK

SEQ ID NO: 8197 - protein, 112 aa, synthetic construct
  REGION 1..112: note = Description of Artificial Sequence: Synthetic polypeptide
DIQMTQSPSSLSASVGDRVTITCRSTKSLLHSNGITYLYWYQQKPGKAPKLLIYQMSNLASGVPSRFSSSGSGTDFTLTISSLQPEDFATYYCAQNLEIPRTFGQGTKVEIK

SEQ ID NO: 8198 - protein, 112 aa, synthetic construct
  REGION 1..112: note = Description of Artificial Sequence: Synthetic polypeptide
DIQMTQSPSSLSASVGDRVTITCRSTKSLLHSNGITYLYWYQQKPGKAPKLLIYQMSNLASGVPSRFSSSGSGTDFTLTISSLQPEDFATYYCAQNLEIPRTFGQGTKVELK

SEQ ID NO: 8199 - protein, 107 aa, synthetic construct
  REGION 1..107: note = Description of Artificial Sequence: Synthetic polypeptide
DIQMTQSPSSLSASVGDRVTITCRASQSISTWLAWYQQKPGKAPKLLIYKASNLHTGVPSRFSGSGSGTEFSLTISGLQPDDFATYYCQQYNSYSRTFGQGTKVEIK

SEQ ID NO: 8200 - protein, 110 aa, synthetic construct
  REGION 1..110: note = Description of Artificial Sequence: Synthetic polypeptide
DIQLTQSPSSLSASVGDRVTITCSVSSSISSNNLHWYQQKPGKAPKPWIYGTSNLASGVPSRFSGSGSGTDYTFTISSLQPEDIATYYCQQWSSYPYMYTFGQGTKVEIK

SEQ ID NO: 8201 - protein, 111 aa, synthetic construct
  REGION 1..111: note = Description of Artificial Sequence: Synthetic polypeptide
DIVLTQSPLSLAVSLGQPAIISCKASQSVSFAGTSLMHWYHQKPGQQPRLLIYRASNLEAGVPDRFSGSGSKTDFTLNISPVEAEDAATYYCQQSREYPYTFGGGTKLEIK

SEQ ID NO: 8202 - protein, 111 aa, synthetic construct
  REGION 1..111: note = Description of Artificial Sequence: Synthetic polypeptide
DIVLTQSPLSLAVSLGQPAIISCKASQSVSFAGTSLMHWYHQKPGQQPRLLIYRASNLEAGVPDRFSGSGSKTDFTLTISPVEAEDAATYYCQQSREYPYTFGGGTKLEIK

SEQ ID NO: 8203 - protein, 100 aa, synthetic construct
  REGION 1..100: note = Description of Artificial Sequence: Synthetic polypeptide
PASLSASVGETVTITCRTSENIFSYLAWYQQKQGISPQLLVYNAKTLAEGVPSRFSGSGSGTQFSLKINSLQPEDFGSYYCQHHYAFPWTFGGGSKLEIK

SEQ ID NO: 8204 - protein, 112 aa, synthetic construct
  REGION 1..112: note = Description of Artificial Sequence: Synthetic polypeptide
DVVMTQSPLSLPVTPGEPASISCRSSQSLVHSNGNTYLHWYLQKPGQSPQLLIYKVSNRFSGVPDRFSGSGSGTDFTLKISRVEAEDVGVYYCSQNTHVPPTFGQGTKLEIK

SEQ ID NO: 8205 - protein, 107 aa, synthetic construct
  REGION 1..107: note = Description of Artificial Sequence: Synthetic polypeptide
EIVLTQSPGTLSLSPGERATLSCRAVQSVSSSYLAWYQQKPGQAPRLLIYGASSRATGIPDRFSGSGSGTDFTLTISRLEPEDFAVYYCQQYGSSPTFGGGTKVEIK

SEQ ID NO: 8206 - protein, 107 aa, synthetic construct
  REGION 1..107: note = Description of Artificial Sequence: Synthetic polypeptide
EIVLTQSPGTLSLSPGERATLSCRASQSVSSSYLAWYQQKPGQAPRLLIYGASSRATGIPDRFSGSGSGTDFTLTISRLEPEDFAVYYCQQYGSSPTFGGGTKVEIK

SEQ ID NO: 8207 - protein, 107 aa, synthetic construct
  REGION 1..107: note = Description of Artificial Sequence: Synthetic polypeptide
EILLTQSPGTLSLSPGERATLSCRASQSVSSSYLAWYQQKPGQAPRLLIYGASSRATGIPDRFSGSGSGTDFTLTISRLEPEDFAVYYCQQYGSSPTFGQGTKVEIK

SEQ ID NO: 8208 - protein, 112 aa, synthetic construct
  REGION 1..112: note = Description of Artificial Sequence: Synthetic polypeptide
DTVMTQTPLSSHVTLGQPASISCRSSQSLVHSDGNTYLSWLQQRPGQPPRLLIYRISRRFSGVPDRFSGSGAGTDFTLEISRVEAEDVGVYYCMQSTHVPRTFGQGTKVEIK

SEQ ID NO: 8209 - protein, 107 aa, synthetic construct
  REGION 1..107: note = Description of Artificial Sequence: Synthetic polypeptide
DILLTQSPVILSVSPGERVSFSCRASQSIGTNIHWYQQRTNGSPRLLIKYASESISGIPSRFSGSGSGTDFTLSINSVESEDIADYYCQQNNNWPTTFGAGTKLELK

SEQ ID NO: 8210 - protein, 106 aa, synthetic construct [sequence omitted]

SEQ ID NO: 8211 - protein, 107 aa, synthetic construct [sequence omitted]

SEQ ID NO: 8212 - protein, 107 aa, synthetic construct [sequence omitted]

SEQ ID NO: 8213 - protein, 107 aa, synthetic construct
  REGION 1..107: note = Description of Artificial Sequence: Synthetic polypeptide
DIQMTQSPSTLSASVGDRVTITCRASQSISSWWAWYQQKPGKAPKLLIYDASSLESGVPSRFSGSGSGTEFTLTISSLQPDDFATYYCQQYHAHPTTFGGGTKVEIK

SEQ ID NO: 8214 - protein, 113 aa, synthetic construct
  REGION 1..113: note = Description of Artificial Sequence: Synthetic polypeptide
DIVMTQSPDSLAVSLGERATINCKSSQSVLYSPNNKNYLAWYQQKPGQPPKLLIYWASTRESGVPDRFSGSGSGTDFTLTISSLQAEDVAVYYCQQYYGSPITFGGGTKVEIK

SEQ ID NO: 8215 - protein, 108 aa, synthetic construct
  REGION 1..108: note = Description of Artificial Sequence: Synthetic polypeptide
EIVMTQSPATLSVSPGERATLSCRASQSVSSNLAWYQQKPGQAPRLLIYGASTRATGIPARFSGSGSGTEFTLTISSLQSEDFAVYYCQDYRTWPRRVFGGGTKVEIK

SEQ ID NO: 8216 - protein, 112 aa, synthetic construct [sequence omitted]

SEQ ID NO: 8217 - protein, 107 aa, synthetic construct [sequence omitted]

SEQ ID NO: 8218 - protein, 112 aa, synthetic construct
  REGION 1..112: note = Description of Artificial Sequence: Synthetic polypeptide
DVVMTQTPLSLPVSLGDQASISCRSSQSLVHSNGNTYLHWYLQKPGQSPKLLIYKVSNRFSGVPDRFSGSGSGTDFTLKISRVEAEDLGVYFCSQSTHVPWTFGGGTKLEIK

SEQ ID NO: 8219 - protein, 111 aa, synthetic construct
  REGION 1..111: note = Description of Artificial Sequence: Synthetic polypeptide
DVVMTQTPLSLPVSLGDQASISCRSSQSLVHSNGNTYLHWYLQKPGQSPKLLIYKVSNRFSGVPDRFSGSGSGTDFTLKISRVEAEDLGVYFCSQSTHVLTFGSGTKLEIK

SEQ ID NO: 8220 - protein, 102 aa, synthetic construct
  REGION 1..102: note = Description of Artificial Sequence: Synthetic polypeptide
QSPSFLSAFVGDRITITCRASPGIRNYLAWYQQKPGKAPKLLIYAASTLQSGVPSRFSGSGSGTDFTLTISSLQPEDFATYYCQQYNSYPLSFGGGTKVEIK

SEQ ID NO: 8221 - protein, 110 aa, synthetic construct
  REGION 1..110: note = Description of Artificial Sequence: Synthetic polypeptide
QAVVTQEPSFSVSPGGTVTLTCGLSSGSVSTSYYPSWYQQTPGQAPRTLIYSTNTRSSGVPDRFSGSILGNKAALTITGAQADDESDYYCVLYMGSGQYVFGGGTKLTVL

SEQ ID NO: 8222 - protein, 107 aa, synthetic construct [sequence omitted]

SEQ ID NO: 8223 - protein, 107 aa, synthetic construct
  REGION 1..107: note = Description of Artificial Sequence: Synthetic polypeptide
DIVMTQSHKFMSTSVGDRVSITCKASQDVNTAVAWYQQKPGHSPKLLIYSASFRYTGVPDRFTGSRSGTDFTFTISSVQAEDLAVYYCQQHYTTPPTFGGGTKVEIK

SEQ ID NO: 8224 - protein, 111 aa, synthetic construct
  REGION 1..111: note = Description of Artificial Sequence: Synthetic polypeptide
QSVLTQPPSVSGAPGQRVTISCTGSSSNIGAGYGVHWYQQLPGTAPKLLIYGNTNRPSGVPDRFSGFKSGTSASLAITGLQAEDEADYYCQFYDSSLSGWVFGGGTKLTVL

SEQ ID NO: 8225 - protein, 107 aa, synthetic construct [sequence omitted]

SEQ ID NO: 8226 - protein, 111 aa, synthetic construct [sequence omitted]

SEQ ID NO: 8227 - protein, 107 aa, synthetic construct [sequence omitted]

SEQ ID NO: 8228 - protein, 111 aa, synthetic construct
  REGION 1..111: note = Description of Artificial Sequence: Synthetic polypeptide
QSALTQPASVSGSPGQSITISCTGTSSDVGGYNFVSWYQQHPGKAPKLMIYDVSDRPSGVSDRFSGSKSGNTASLIISGLQADDEADYYCSSYGSSSTHVIFGGGTKVTVL

SEQ ID NO: 8229 - protein, 110 aa, synthetic construct
  REGION 1..110: note = Description of Artificial Sequence: Synthetic polypeptide
QSVLTQPPSVSAAPGQKVTISCSGSSSNIGNNYVSWYQQLPGTAPKLLIYDHTNRPAGVPDRFSGSKSGTSASLAISGFRSEDEADYYCASWDYTLSGWVFGGGTKLTVL

SEQ ID NO: 8230 - protein, 112 aa, synthetic construct
  REGION 1..112: note = Description of Artificial Sequence: Synthetic polypeptide
DIQMTQSPSSLSASVGDRVTITCRSSQRIVHSNGNTYLEWYQQTPGKAPKLLIYKVSNRFSGVPSRFSGSGSGTDFTFTISSLQPEDIATYYCFQGSHVPFTFGQGTKLQIT

SEQ ID NO: 8231 - protein, 111 aa, synthetic construct
  REGION 1..111: note = Description of Artificial Sequence: Synthetic polypeptide
DIALTQPASVSGSPGQSITISCTGTSSDIGGYNSVSWYQQHPGKAPKLMIYGVNNRPSGVSNRFSGSKSGNTASLTISGLQAEDEADYYCSSYDIESATPVFGGGTKLTVL

SEQ ID NO: 8232 - protein, 106 aa, synthetic construct
  REGION 1..106: note = Description of Artificial Sequence: Synthetic polypeptide
DIELTQSPAIMSASPGEKVTMTCSASSSVSYMHWYQQKSGTSPKRWIYDTSKLASGVPGRFSGSGSGNSYSLTISSVEAEDDATYYCQQWSGYPLTFGAGTKLEIK

SEQ ID NO: 8233 - protein, 107 aa, synthetic construct
  REGION 1..107: note = Description of Artificial Sequence: Synthetic polypeptide
EIVLTQSPATLSLSPGERATLSCRASQSVSSYLAWYQQKPGQAPRLLIYDASNRATGIPARFSGSGSGTDFTLTISSLEPEDFAVYYCQQRSNWPLTFGGGTKVEIK

SEQ ID NO: 8234 - protein, 108 aa, synthetic construct
  REGION 1..108: note = Description of Artificial Sequence: Synthetic polypeptide
EIVLTQSPGTLSLSPGERATLSCRASQSVSSSYLAWYQQKPGQAPRLLIYGASSRATGIPDRFSGSGSGTDFTLTISRLEPEDFAVYYCQQYGSSQYTFGQGTKLEIK

SEQ ID NO: 8235 - protein, 106 aa, synthetic construct
  REGION 1..106: note = Description of Artificial Sequence: Synthetic polypeptide
DIELTQSPAIMSASPGEKVTMTCSASSSVSYMHWYQQKSGTSPKRWIYDTSKLASGVPGRFSGSGSGNSYSLTISSVEAEDDATYYCQQWSKHPLTFGSGTKVEIK

SEQ ID NO: 8236 - protein, 108 aa, synthetic construct
  REGION 1..108: note = Description of Artificial Sequence: Synthetic polypeptide
DIVMTQSPAIMSASPGEKVTMTCSASSSVSSSYLYWYQQKPGSSPKLWIYSTSNLASGVPARFSGSGSGTSYSLTISSMEAEDAASYFCHQWNRYPYTFGGGTKLEIK

SEQ ID NO: 8237 - protein, 108 aa, synthetic construct
  REGION 1..108: note = Description of Artificial Sequence: Synthetic polypeptide
DIQLTQSPSSLSASVGDRVTMTCSASSSVSSSYLYWYQQKPGKAPKLWIYSTSNLASGVPARFSGSGSGTDFTLTISSLQPEDSASYFCHQWNRYPYTFGGGTRLEIK

SEQ ID NO: 8238 - protein, 106 aa, synthetic construct
  REGION 1..106: note = Description of Artificial Sequence: Synthetic polypeptide
EIVLTQSPATMSASPGERVTITCSAHSSVSFMHWFQQKPGTSPKLWIYSTSSLASGVPARFGGSGSGTSYSLTISSMEAEDAATYYCQQRSSFPLTFGAGTKLELK

SEQ ID NO: 8239 - protein, 113 aa, synthetic construct
  REGION 1..113: note = Description of Artificial Sequence: Synthetic polypeptide
DIVMSQSPSSLAVSVGEKVTMSCKSSQSLLYSSNQKIYLAWYQQKPGQSPKLLIYWASTRESGVPDRFTGGGSGTDFTLTISSVKAEDLAVYYCQQYYRYPRTFGGGTKLEIK

SEQ ID NO: 8240 - protein, 113 aa, synthetic construct
  REGION 1..113: note = Description of Artificial Sequence: Synthetic polypeptide
DIQMTQSPSSLSASVGDRVTITCKSSQSLLYSSNQKIYLAWYQQKPGKAPKLLIYWASTRESGVPSRFSGSGSGTDFTFTISSLQPEDIATYYCQQYYRYPRTFGQGTKVEIK

SEQ ID NO: 8241 - protein, 106 aa, synthetic construct
  REGION 1..106: note = Description of Artificial Sequence: Synthetic polypeptide
EIVLTQSPATLSLSPGERATLSCRASQSVSSYLAWYQQKPGQAPRLLIYDASNRATGIPARFSGSGSGTDFTLTISSLEPEDFAVYYCQQRSNWPTFGQGTKVEIK

SEQ ID NO: 8242 - protein, 108 aa, synthetic construct
  REGION 1..108: note = Description of Artificial Sequence: Synthetic polypeptide
EIVLTQSPGTLSLSPGERATLSCRASQRVSSSYLAWYQQKPGQAPRLLIYDASSRATGIPDRFSGSGSGTDFTLTISRLEPEDFAVYYCQQYGSLPWTFGQGTKVEIK

SEQ ID NO: 8243 - protein, 107 aa, synthetic construct [sequence omitted]

SEQ ID NO: 8244 - protein, 110 aa, synthetic construct
  REGION 1..110: note = Description of Artificial Sequence: Synthetic polypeptide
QSALTQPASVSGSPGQSITISCTGTSSDVGGYNYVSWYQQHPGKAPKLMIYDVSNRPSGVSNRFSGSKSGNTASLTISGLQAEDEADYYCSSYTSSSTRVFGTGTKVTVL

SEQ ID NO: 8245 - protein, 107 aa, synthetic construct
  REGION 1..107: note = Description of Artificial Sequence: Synthetic polypeptide
DIQMTQSPSSLSTSVGDRVTLTCKASQDVGTAVDWYQQKPGPSPKLLIYWASTRHTGIPSRFSGSGSGTDFTLTISSLQPEDFADYYCQQYNSYPLTFGPGTKVDIK

SEQ ID NO: 8246 - protein, 107 aa, synthetic construct
  REGION 1..107: note = Description of Artificial Sequence: Synthetic polypeptide
DIQMTQSPSSLSASVGDRVTITCKASQNVDTNVAWYQQKPGQAPKSLIYSASYRYSDVPSRFSGSASGTDFTLTISSVQSEDFATYYCQQYDSYPYTFGGGTKLEIK

SEQ ID NO: 8247 - protein, 112 aa, synthetic construct
  REGION 1..112: note = Description of Artificial Sequence: Synthetic polypeptide
ELVLTQSPSVSAALGSPAKITCTLSSAHKTDTIDWYQQLQGEAPRYLMQVQSDGSYTKRPGVPDRFSGSSSGADRYLIIPSVQADDEADYYCGADYIGGYVFGGGTQLTVTG

SEQ ID NO: 8248 - protein, 107 aa, synthetic construct
  REGION 1..107: note = Description of Artificial Sequence: Synthetic polypeptide
DIKMTQSPSSMYASLGERVTITCKASPDINSYLSWFQQKPGKSPKTLIYRANRLVDGVPSRFSGGGSGQDYSLTINSLEYEDMGIYYCLQYDEFPYTFGGGTKLEMK

SEQ ID NO: 8249 - protein, 108 aa, synthetic construct
  REGION 1..108: note = Description of Artificial Sequence: Synthetic polypeptide
ELVMTQTPSSVSAAVGGTVTINCQASQSIGSYLAWYQQKPGQPPKLLIYYASNLASGVPSRFSGSGSGTEYTLTISGVQREDAATYYCLGSLSNSDNVFGGGTELEIL

SEQ ID NO: 8250 - protein, 110 aa, synthetic construct
  REGION 1..110: note = Description of Artificial Sequence: Synthetic polypeptide
ELVMTQTPSSTSGAVGGTVTINCQASQSIDSNLAWFQQKPGQPPTLLIYRASNLASGVPSRFSGSRSGTEYTLTISGVQREDAATYYCLGGVGNVSYRTSFGGGTEVVVK

SEQ ID NO: 8251 - protein, 113 aa, synthetic construct
  REGION 1..113: note = Description of Artificial Sequence: Synthetic polypeptide
DIVMSQSPDSLAVSLGERVTLNCKSSQSLLYSGNQKNYLAWYQQKPGQSPKLLIYWASARESGVPDRFSGSGSGTDFTLTISSVQAEDVAVYYCQQYYSYPLTFGAGTKLELK

SEQ ID NO: 8252 - protein, 107 aa, synthetic construct
  REGION 1..107: note = Description of Artificial Sequence: Synthetic polypeptide
SIVMTQTPKFLLVSAGDRVTITCKASQSVSNDVAWYQQKPGQSPKLLINFATNRYTGVPNRFTGSGYGTDFTFTISTVQAEDLALYFCQQDYSSPWTFGGGTKLEIK

SEQ ID NO: 8253 - protein, 115 aa, synthetic construct
  REGION 1..115: note = Description of Artificial Sequence: Synthetic polypeptide
SVIMSRGQIVLTQSPAIMSASLGERVTLTCTASSSVNSNYLHWYQQKPGSSPKLWIYSTSNLASGVPARFSGSGSGTSYSLTISSMEAEDAATYYCHQYHRSPLTFGAGTKLELK

SEQ ID NO: 8254 - protein, 107 aa, synthetic construct
  REGION 1..107: note = Description of Artificial Sequence: Synthetic polypeptide
DIVMTQSHIFMSTSVGDRVSITCKASQDVDTAVAWYQQKPGQSPKLLIYWASTRLTGVPDRFTGSGSGTDFTLTISNVQSEDLADYFCQQYSSYPYTFGGGTKLEIK

SEQ ID NO: 8255 - protein, 107 aa, synthetic construct
  REGION 1..107: note = Description of Artificial Sequence: Synthetic polypeptide
DIQLTQSPSSLSASVGDRVSITCKASQDVSIAVAWYQQKPGKAPKLLIYSASYRYTGVPDRFSGSGSGTDFTLTISSLQPEDFAVYYCQQHYITPLTFGAGTKVEIK

SEQ ID NO: 8256 - protein, 108 aa, synthetic construct
  REGION 1..108: note = Description of Artificial Sequence: Synthetic polypeptide
EIVLTQSPGTLSLSPGERATLSCRASQSVSSSYLAWYQQKPGQAPRLLIYGASSRATGIPDRFSGSGSGTDFTLTISRLEPEDFAVYYCQQYGSSPLTFGGGTKVEIK

SEQ ID NO: 8257 - protein, 107 aa, synthetic construct [sequence omitted]

SEQ ID NO: 8258 - protein, 107 aa, synthetic construct
  REGION 1..107: note = Description of Artificial Sequence: Synthetic polypeptide
DIQMTQSPSSLSASVGDRVTITCRASQDIAGSLNWLQQKPGKAIKRLIYATSSLDSGVPKRFSGSRSGSDYTLTISSLQPEDFATYYCLQYGSFPPTFGQGTKVEIK

SEQ ID NO: 8259 - protein, 111 aa, synthetic construct
  REGION 1..111: note = Description of Artificial Sequence: Synthetic polypeptide
DIVLTQSPASLAVSLGQRATISCRASESVDSYGNSFMHWYQQKPGQPPKLLIYRASNLESGIPARFSGSGSRTDFTLTINPVEADDVATYYCQQSNEDPLTFGAGTKLELK

SEQ ID NO: 8260 - protein, 15 aa, synthetic construct
  REGION 1..15: note = Description of Artificial Sequence: Synthetic peptide
SPAGSPTSTESGTSE

SEQ ID NO: 8261 - protein, 16 aa, synthetic construct
  REGION 1..16: note = Description of Artificial Sequence: Synthetic peptide
EAGRSANHEPLGLVAT

SEQ ID NO: 8262 - protein, 16 aa, synthetic construct
  REGION 1..16: note = Description of Artificial Sequence: Synthetic peptide
ASGRSTNAGPSGLAGP

SEQ ID NO: 8263 - protein, 16 aa, synthetic construct
  REGION 1..16: note = Description of Artificial Sequence: Synthetic peptide
ASGRSTNAGPQGLAGQ

SEQ ID NO: 8264 - protein, 16 aa, synthetic construct
  REGION 1..16: note = Description of Artificial Sequence: Synthetic peptide
ASGRSTNAGPPGLTGP

SEQ ID NO: 8265 - protein, 16 aa, synthetic construct
  REGION 1..16: note = Description of Artificial Sequence: Synthetic peptide
ASSRGTNAGPAGLTGP

SEQ ID NO: 8266 - protein, 16 aa, synthetic construct
  REGION 1..16: note = Description of Artificial Sequence: Synthetic peptide
ASSRTTNTGPSTLTGP

SEQ ID NO: 8267 - protein, 16 aa, synthetic construct
  REGION 1..16: note = Description of Artificial Sequence: Synthetic peptide
AAGRSDNGTPLELVAP

SEQ ID NO: 8268 - protein, 16 aa, synthetic construct
  REGION 1..16: note = Description of Artificial Sequence: Synthetic peptide
ASGRGTNAGPAGLTGP

SEQ ID NO: 8269 - protein, 16 aa, synthetic construct
  REGION 1..16: note = Description of Artificial Sequence: Synthetic peptide
LFGRNDNHEPLELGGG

SEQ ID NO: 8270 - protein, 16 aa, synthetic construct
  REGION 1..16: note = Description of Artificial Sequence: Synthetic peptide
TAGRSDNLEPLGLVFG

SEQ ID NO: 8271 - protein, 16 aa, synthetic construct
  REGION 1..16: note = Description of Artificial Sequence: Synthetic peptide
LDGRSDNFHPPELVAG

SEQ ID NO: 8272 - protein, 16 aa, synthetic construct
  REGION 1..16: note = Description of Artificial Sequence: Synthetic peptide
LEGRSDNEEPENLVAG

SEQ ID NO: 8273 - protein, 16 aa, synthetic construct
  REGION 1..16: note = Description of Artificial Sequence: Synthetic peptide
LKGRSDNNAPLALVAG

SEQ ID NO: 8274 - protein, 16 aa, synthetic construct
  REGION 1..16: note = Description of Artificial Sequence: Synthetic peptide
VYSRGTNAGPHGLTGR

SEQ ID NO: 8275 - protein, 16 aa, synthetic construct
  REGION 1..16: note = Description of Artificial Sequence: Synthetic peptide
ANSRGTNKGFAGLIGP

SEQ ID NO: 8276 - protein, 16 aa, synthetic construct
  REGION 1..16: note = Description of Artificial Sequence: Synthetic peptide
ASSRLTNEAPAGLTIP

SEQ ID NO: 8277 - protein, 16 aa, synthetic construct
  REGION 1..16: note = Description of Artificial Sequence: Synthetic peptide
DQSRGTNAGPEGLTDP

SEQ ID NO: 8278 - protein, 16 aa, synthetic construct
  REGION 1..16: note = Description of Artificial Sequence: Synthetic peptide
ESSRGTNIGQGGLTGP

SEQ ID NO: 8279 - protein, 16 aa, synthetic construct
  REGION 1..16: note = Description of Artificial Sequence: Synthetic peptide
SSSRGTNQDPAGLTIP

SEQ ID NO: 8280 - protein, 16 aa, synthetic construct
  REGION 1..16: note = Description of Artificial Sequence: Synthetic peptide
ASSRGQNHSPMGLTGP

SEQ ID NO: 8281 - protein, 16 aa, synthetic construct
  REGION 1..16: note = Description of Artificial Sequence: Synthetic peptide
AYSRGPNAGPAGLEGR

SEQ ID NO: 8282 - protein, 16 aa, synthetic construct
  REGION 1..16: note = Description of Artificial Sequence: Synthetic peptide
ASERGNNAGPANLTGF

SEQ ID NO: 8283 - protein, 16 aa, synthetic construct
  REGION 1..16: note = Description of Artificial Sequence: Synthetic peptide
ASHRGTNPKPAILTGP

SEQ ID NO: 8284 - protein, 16 aa, synthetic construct
  REGION 1..16: note = Description of Artificial Sequence: Synthetic peptide
MSSRRTNANPAQLTGP

SEQ ID NO: 8285 - protein, 16 aa, synthetic construct
  REGION 1..16: note = Description of Artificial Sequence: Synthetic peptide
GAGRTDNHEPLELGAA

SEQ ID NO: 8286 - protein, 16 aa, synthetic construct
  REGION 1..16: note = Description of Artificial Sequence: Synthetic peptide
LAGRSENTAPLELTAG

SEQ ID NO: 8287 - protein, 16 aa, synthetic construct
  REGION 1..16: note = Description of Artificial Sequence: Synthetic peptide
LEGRPDNHEPLALVAS

SEQ ID NO: 8288 - protein, 16 aa, synthetic construct
  REGION 1..16: note = Description of Artificial Sequence: Synthetic peptide
LSGRSDNEEPLALPAG

SEQ ID NO: 8289 - protein, 16 aa, synthetic construct
  REGION 1..16: note = Description of Artificial Sequence: Synthetic peptide
EAGRTDNHEPLELSAP

SEQ ID NO: 8290 - protein, 16 aa, synthetic construct
  REGION 1..16: note = Description of Artificial Sequence: Synthetic peptide
EGGRSDNHGPLELVSG

SEQ ID NO: 8291 - protein, 16 aa, synthetic construct
  REGION 1..16: note = Description of Artificial Sequence: Synthetic peptide
LSGRSDNEAPLELEAG

SEQ ID NO: 8292 - protein, 16 aa, synthetic construct
  REGION 1..16: note = Description of Artificial Sequence: Synthetic peptide
LGGRADNHEPPELGAG

SEQ ID NO: 8293 - protein, 16 aa, synthetic construct
  REGION 1..16: note = Description of Artificial Sequence: Synthetic peptide
PPSRGTNAEPAGLTGE

SEQ ID NO: 8294 - protein, 16 aa, synthetic construct
  REGION 1..16: note = Description of Artificial Sequence: Synthetic peptide
ASTRGENAGPAGLEAP

SEQ ID NO: 8295 - protein, 16 aa, synthetic construct
  REGION 1..16: note = Description of Artificial Sequence: Synthetic peptide
ESSRGTNGAPEGLTGP

SEQ ID NO: 8296 - protein, 16 aa, synthetic construct
  REGION 1..16: note = Description of Artificial Sequence: Synthetic peptide
ASSRATNESPAGLTGE

SEQ ID NO: 8297 - protein, 16 aa, synthetic construct
  REGION 1..16: note = Description of Artificial Sequence: Synthetic peptide
ASSRGENPPPGGLTGP

SEQ ID NO: 8298 - protein, 16 aa, synthetic construct
  REGION 1..16: note = Description of Artificial Sequence: Synthetic peptide
AASRGTNTGPAELTGS

SEQ ID NO: 8299 - protein, 16 aa, synthetic construct
  REGION 1..16: note = Description of Artificial Sequence: Synthetic peptide
AGSRTTNAGPGGLEGP

SEQ ID NO: 8300 - protein, 16 aa, synthetic construct
  REGION 1..16: note = Description of Artificial Sequence: Synthetic peptide
APSRGENAGPATLTGA

SEQ ID NO: 8301 - protein, 16 aa, synthetic construct
  REGION 1..16: note = Description of Artificial Sequence: Synthetic peptide
ESGRAANTGPPTLTAP

SEQ ID NO: 8302 - protein, 16 aa, synthetic construct
  REGION 1..16: note = Description of Artificial Sequence: Synthetic peptide
NPGRAANEGPPGLPGS

SEQ ID NO: 8303 - protein, 16 aa, synthetic construct
  REGION 1..16: note = Description of Artificial Sequence: Synthetic peptide
ESSRAANLTPPELTGP

SEQ ID NO: 8304 - protein, 16 aa, synthetic construct
  REGION 1..16: note = Description of Artificial Sequence: Synthetic peptide
ASGRAANETPPGLTGA

SEQ ID NO: 8305 - protein, 16 aa, synthetic construct
  REGION 1..16: note = Description of Artificial Sequence: Synthetic peptide
NSGRGENLGAPGLTGT

SEQ ID NO: 8306 - protein, 16 aa, synthetic construct
  REGION 1..16: note = Description of Artificial Sequence: Synthetic peptide
TTGRAANLTPAGLTGP

SEQ ID NO: 8307 - protein, 16 aa, synthetic construct
  REGION 1..16: note = Description of Artificial Sequence: Synthetic peptide
EAGRSANHTPAGLTGP

SEQ ID NO: 8308 - protein, 16 aa, synthetic construct
  REGION 1..16: note = Description of Artificial Sequence: Synthetic peptide
ESGRAANTTPAGLTGP

SEQ ID NO: 8309 - protein, 19 aa, synthetic construct
  REGION 1..19: note = Description of Artificial Sequence: Synthetic peptide
TTGRATEAANLTPAGLTGP

SEQ ID NO: 8310 - protein, 19 aa, synthetic construct
  REGION 1..19: note = Description of Artificial Sequence: Synthetic peptide
TTGRAEEAANLTPAGLTGP

SEQ ID NO: 8311 - protein, 19 aa, synthetic construct
  REGION 1..19: note = Description of Artificial Sequence: Synthetic peptide
TTGRAGEAANLTPAGLTGP

SEQ ID NO: 8312 - protein, 19 aa, synthetic construct
  REGION 1..19: note = Description of Artificial Sequence: Synthetic peptide
TTGRATEAANATPAGLTGP

SEQ ID NO: 8313 - protein, 19 aa, synthetic construct
  REGION 1..19: note = Description of Artificial Sequence: Synthetic peptide
TTGRAGEAEGATSAGATGP

SEQ ID NO: 8314 - protein, 19 aa, synthetic construct
  REGION 1..19: note = Description of Artificial Sequence: Synthetic peptide
TTGEAGEAANATSAGATGP

SEQ ID NO: 8315 - protein, 19 aa, synthetic construct
  REGION 1..19: note = Description of Artificial Sequence: Synthetic peptide
TTGEAGEAAGLTPAGLTGP

SEQ ID NO: 8316 - protein, 19 aa, synthetic construct
  REGION 1..19: note = Description of Artificial Sequence: Synthetic peptide
TTGAAGEAANATPAGLTGP

SEQ ID NO: 8317 - protein, 19 aa, synthetic construct
  REGION 1..19: note = Description of Artificial Sequence: Synthetic peptide
TTGRAGEAAGLTPAGLTGP

SEQ ID NO: 8318 - protein, 19 aa, synthetic construct
  REGION 1..19: note = Description of Artificial Sequence: Synthetic peptide
TTGRAGEAANATSAGATGP

SEQ ID NO: 8319 - protein, 19 aa, synthetic construct
  REGION 1..19: note = Description of Artificial Sequence: Synthetic peptide
TTGEAGEAAGATSAGATGP

SEQ ID NO: 8320 - protein, 16 aa, synthetic construct
  REGION 1..16: note = Description of Artificial Sequence: Synthetic peptide
ESGRAANTEPPELGAG

SEQ ID NO: 8321 - protein, 16 aa, synthetic construct
  REGION 1..16: note = Description of Artificial Sequence: Synthetic peptide
ESGRAANTAPEGLTGP

SEQ ID NO: 8322 - protein, 16 aa, synthetic construct
  REGION 1..16: note = Description of Artificial Sequence: Synthetic peptide
EPGRAANHEPSGLTEG

SEQ ID NO: 8323 - protein, 19 aa, synthetic construct
  REGION 1..19: note = Description of Artificial Sequence: Synthetic peptide
ESGRAANHTGAPPGGLTGP

SEQ ID NO: 8324 - protein, 19 aa, synthetic construct
  REGION 1..19: note = Description of Artificial Sequence: Synthetic peptide
TTGRTGEGANATPGGLTGP

SEQ ID NO: 8325 - protein, 19 aa, synthetic construct
  REGION 1..19: note = Description of Artificial Sequence: Synthetic peptide
RTGRSGEAANETPEGLEGP

SEQ ID NO: 8326 - protein, 19 aa, synthetic construct
  REGION 1..19: note = Description of Artificial Sequence: Synthetic peptide
RTGRTGESANETPAGLGGP

SEQ ID NO: 8327 - protein, 19 aa, synthetic construct
  REGION 1..19: note = Description of Artificial Sequence: Synthetic peptide
STGRTGEPANETPAGLSGP

SEQ ID NO: 8328 - protein, 19 aa, synthetic construct
  REGION 1..19: note = Description of Artificial Sequence: Synthetic peptide
TTGRAGEPANATPTGLSGP

SEQ ID NO: 8329 - protein, 19 aa, synthetic construct
  REGION 1..19: note = Description of Artificial Sequence: Synthetic peptide
RTGRPGEGANATPTGLPGP

SEQ ID NO: 8330 - protein, 19 aa, synthetic construct
  REGION 1..19: note = Description of Artificial Sequence: Synthetic peptide
RTGRGGEAANATPSGLGGP

SEQ ID NO: 8331 - protein, 19 aa, synthetic construct
  REGION 1..19: note = Description of Artificial Sequence: Synthetic peptide
STGRSGESANATPGGLGGP

SEQ ID NO: 8332 - protein, 19 aa, synthetic construct
  REGION 1..19: note = Description of Artificial Sequence: Synthetic peptide
RTGRTGEEANATPAGLPGP

SEQ ID NO: 8333 - protein, 19 aa, synthetic construct
  REGION 1..19: note = Description of Artificial Sequence: Synthetic peptide
ATGRPGEPANTTPEGLEGP

SEQ ID NO: 8334 - protein, 19 aa, synthetic construct
  REGION 1..19: note = Description of Artificial Sequence: Synthetic peptide
STGRSGEPANATPGGLTGP

SEQ ID NO: 8335 - protein, 19 aa, synthetic construct
  REGION 1..19: note = Description of Artificial Sequence: Synthetic peptide
PTGRGGEGANTTPTGLPGP

SEQ ID NO: 8336 - protein, 19 aa, synthetic construct
  REGION 1..19: note = Description of Artificial Sequence: Synthetic peptide
PTGRSGEGANATPSGLTGP

SEQ ID NO: 8337 - protein, 19 aa, synthetic construct
  REGION 1..19: note = Description of Artificial Sequence: Synthetic peptide
TTGRASEGANSTPAPLTEP

SEQ ID NO: 8338 - protein, 19 aa, synthetic construct
  REGION 1..19: note = Description of Artificial Sequence: Synthetic peptide
TYGRAAEAANTTPAGLTAP

SEQ ID NO: 8339 - protein, 19 aa, synthetic construct
  REGION 1..19: note = Description of Artificial Sequence: Synthetic peptide
TTGRATEGANATPAELTEP

SEQ ID NO: 8340 - protein, 19 aa, synthetic construct
  REGION 1..19: note = Description of Artificial Sequence: Synthetic peptide
TVGRASEEANTTPASLTGP

SEQ ID NO: 8341 - protein, 19 aa, synthetic construct
  REGION 1..19: note = Description of Artificial Sequence: Synthetic peptide
TTGRAPEAANATPAPLTGP

SEQ ID NO: 8342 - protein, 19 aa, synthetic construct
  REGION 1..19: note = Description of Artificial Sequence: Synthetic peptide
TWGRATEPANATPAPLTSP

SEQ ID NO: 8343 - protein, 19 aa, synthetic construct
  REGION 1..19: note = Description of Artificial Sequence: Synthetic peptide
TVGRASESANATPAELTSP

SEQ ID NO: 8344 - protein, 19 aa, synthetic construct
  REGION 1..19: note = Description of Artificial Sequence: Synthetic peptide
TVGRAPEGANSTPAGLTGP

SEQ ID NO: 8345 - protein, 19 aa, synthetic construct
  REGION 1..19: note = Description of Artificial Sequence: Synthetic peptide
TWGRATEAPNLEPATLTTP

SEQ ID NO: 8346 - protein, 19 aa, synthetic construct
  REGION 1..19: note = Description of Artificial Sequence: Synthetic peptide
TTGRATEAPNLTPAPLTEP

SEQ ID NO: 8347 - protein, 19 aa, synthetic construct
  REGION 1..19: note = Description of Artificial Sequence: Synthetic peptide
TQGRATEAPNLSPAALTSP

SEQ ID NO: 8348 - protein, 19 aa, synthetic construct
  REGION 1..19: note = Description of Artificial Sequence: Synthetic peptide
TQGRAAEAPNLTPATLTAP

SEQ ID NO: 8349 - protein, 19 aa, synthetic construct
  REGION 1..19: note = Description of Artificial Sequence: Synthetic peptide
TSGRAPEATNLAPAPLTGP

SEQ ID NO: 8350 - protein, 19 aa, synthetic construct
  REGION 1..19: note = Description of Artificial Sequence: Synthetic peptide
TQGRAAEAANLTPAGLTEP

SEQ ID NO: 8351 - protein, 19 aa, synthetic construct
  REGION 1..19: note = Description of Artificial Sequence: Synthetic peptide
TTGRAGSAPNLPPTGLTTP

SEQ ID NO: 8352 - protein, 19 aa, synthetic construct
  REGION 1..19: note = Description of Artificial Sequence: Synthetic peptide
TTGRAGGAENLPPEGLTAP

SEQ ID NO: 8353 - protein, 19 aa, synthetic construct
  REGION 1..19: note = Description of Artificial Sequence: Synthetic peptide
TTSRAGTATNLTPEGLTAP

SEQ ID NO: 8354 - protein, 19 aa, synthetic construct
  REGION 1..19: note = Description of Artificial Sequence: Synthetic peptide
TTGRAGTATNLPPSGLTTP

SEQ ID NO: 8355 - protein, 19 aa, synthetic construct
  REGION 1..19: note = Description of Artificial Sequence: Synthetic peptide
TTARAGEAENLSPSGLTAP

SEQ ID NO: 8356 - protein, 19 aa, synthetic construct
  REGION 1..19: note = Description of Artificial Sequence: Synthetic peptide
TTGRAGGAGNLAPGGLTEP

SEQ ID NO: 8357 - protein, 19 aa, synthetic construct
  REGION 1..19: note = Description of Artificial Sequence: Synthetic peptide
TTGRAGTATNLPPEGLTGP

SEQ ID NO: 8358 - protein, 19 aa, synthetic construct
  REGION 1..19: note = Description of Artificial Sequence: Synthetic peptide
TTGRAGGAANLAPTGLTEP

SEQ ID NO: 8359 - protein, 19 aa, synthetic construct
  REGION 1..19: note = Description of Artificial Sequence: Synthetic peptide
TTGRAGTAENLAPSGLTTP

SEQ ID NO: 8360 - protein, 19 aa, synthetic construct
  REGION 1..19: note = Description of Artificial Sequence: Synthetic peptide
TTGRAGSATNLGPGGLTGP

SEQ ID NO: 8361 - protein, 19 aa, synthetic construct
  REGION 1..19: note = Description of Artificial Sequence: Synthetic peptide
TTARAGGAENLTPAGLTEP

SEQ ID NO: 8362 - protein, 19 aa, synthetic construct
  REGION 1..19: note = Description of Artificial Sequence: Synthetic peptide
TTARAGSAENLSPSGLTGP

SEQ ID NO: 8363 - protein, 19 aa, synthetic construct
  REGION 1..19: note = Description of Artificial Sequence: Synthetic peptide
TTARAGGAGNLAPEGLTTP

SEQ ID NO: 8364 - protein, 19 aa, synthetic construct
  REGION 1..19: note = Description of Artificial Sequence: Synthetic peptide
TTSRAGAAENLTPTGLTGP

SEQ ID NO: 8365 - protein, 19 aa, synthetic construct
  REGION 1..19: note = Description of Artificial Sequence: Synthetic peptide
TYGRTTTPGNEPPASLEAE

SEQ ID NO: 8366 - protein, 19 aa, synthetic construct
  REGION 1..19: note = Description of Artificial Sequence: Synthetic peptide
TYSRGESGPNEPPPGLTGP

SEQ ID NO: 8367 - protein, 19 aa, synthetic construct
  REGION 1..19: note = Description of Artificial Sequence: Synthetic peptide
AWGRTGASENETPAPLGGE

SEQ ID NO: 8368 - protein, 19 aa, synthetic construct
  REGION 1..19: note = Description of Artificial Sequence: Synthetic peptide
RWGRAETTPNTPPEGLETE

SEQ ID NO: 8369 - protein, 19 aa, synthetic construct
  REGION 1..19: note = Description of Artificial Sequence: Synthetic peptide
ESGRAANHTGAEPPELGAG

SEQ ID NO: 8370 - protein, 19 aa, synthetic construct
  REGION 1..19: note = Description of Artificial Sequence: Synthetic peptide
TTGRAGEAANLTPAGLTES

SEQ ID NO: 8371 - protein, 19 aa, synthetic construct
  REGION 1..19: note = Description of Artificial Sequence: Synthetic peptide
TTGRAGEAANLTPAALTES

SEQ ID NO: 8372 - protein, 19 aa, synthetic construct
  REGION 1..19: note = Description of Artificial Sequence: Synthetic peptide
TTGRAGEAANLTPAPLTES

SEQ ID NO: 8373 - protein, 19 aa, synthetic construct
  REGION 1..19: note = Description of Artificial Sequence: Synthetic peptide
TTGRAGEAANLTPEPLTES

SEQ ID NO: 8374 - protein, 19 aa, synthetic construct
  REGION 1..19: note = Description of Artificial Sequence: Synthetic peptide
TTGRAGEAANLTPAGLTGA

SEQ ID NO: 8375 - protein, 19 aa, synthetic construct
  REGION 1..19: note = Description of Artificial Sequence: Synthetic peptide
TTGRAGEAANLTPEGLTGA

SEQ ID NO: 8376 - protein, 19 aa, synthetic construct
  REGION 1..19: note = Description of Artificial Sequence: Synthetic peptide
TTGRAGEAANLTPEPLTGA

SEQ ID NO: 8377 - protein, 19 aa, synthetic construct
  REGION 1..19: note = Description of Artificial Sequence: Synthetic peptide
TTGRAGEAANLTPAGLTEA

SEQ ID NO: 8378 - protein, 19 aa, synthetic construct
  REGION 1..19: note = Description of Artificial Sequence: Synthetic peptide
TTGRAGEAANLTPEGLTEA

SEQ ID NO: 8379 - protein, 19 aa, synthetic construct
  REGION 1..19: note = Description of Artificial Sequence: Synthetic peptide
TTGRAGEAANLTPAPLTEA

SEQ ID NO: 8380 - protein, 19 aa, synthetic construct
  REGION 1..19: note = Description of Artificial Sequence: Synthetic peptide
TTGRAGEAANLTPEPLTEA

SEQ ID NO: 8381 - protein, 19 aa, synthetic construct
  REGION 1..19: note = Description of Artificial Sequence: Synthetic peptide
TTGRAGEAANLTPEPLTGP

SEQ ID NO: 8382 - protein, 19 aa, synthetic construct
  REGION 1..19: note = Description of Artificial Sequence: Synthetic peptide
TTGRAGEAANLTPAGLTGG

SEQ ID NO: 8383 - protein, 19 aa, synthetic construct
  REGION 1..19: note = Description of Artificial Sequence: Synthetic peptide
TTGRAGEAANLTPEGLTGG

SEQ ID NO: 8384 - protein, 19 aa, synthetic construct
  REGION 1..19: note = Description of Artificial Sequence: Synthetic peptide
TTGRAGEAANLTPEALTGG

SEQ ID NO: 8385 - protein, 19 aa, synthetic construct
  REGION 1..19: note = Description of Artificial Sequence: Synthetic peptide
TTGRAGEAANLTPEPLTGG

SEQ ID NO: 8386 - protein, 19 aa, synthetic construct
  REGION 1..19: note = Description of Artificial Sequence: Synthetic peptide
TTGRAGEAANLTPAGLTEG

SEQ ID NO: 8387 - protein, 19 aa, synthetic construct
  REGION 1..19: note = Description of Artificial Sequence: Synthetic peptide
TTGRAGEAANLTPEGLTEG

SEQ ID NO: 8388 - protein, 19 aa, synthetic construct
  REGION 1..19: note = Description of Artificial Sequence: Synthetic peptide
TTGRAGEAANLTPAPLTEG

SEQ ID NO: 8389 - protein, 19 aa, synthetic construct
  REGION 1..19: note = Description of Artificial Sequence: Synthetic peptide
TTGRAGEAANLTPEPLTEG

SEQ ID NO: 8390 - protein, 29 aa, synthetic construct
  REGION 1..29: note = Description of Artificial Sequence: Synthetic peptide
GSAPGSAGGYAELRMGGAIATSGSETPGT

SEQ ID NO: 8391 - protein, 29 aa, synthetic construct
  REGION 1..29: note = Description of Artificial Sequence: Synthetic peptide
GSAPGTGGGYAPLRMGGGAATSGSETPGT

SEQ ID NO: 8392 - protein, 29 aa, synthetic construct
  REGION 1..29: note = Description of Artificial Sequence: Synthetic peptide
GSAPGAEGGYAALRMGGEIATSGSETPGT

SEQ ID NO: 8393 - protein, 29 aa, synthetic construct
  REGION 1..29: note = Description of Artificial Sequence: Synthetic peptide
GSAPGGPGGYALLRMGGPAATSGSETPGT

SEQ ID NO: 8394 - protein, 29 aa, synthetic construct
  REGION 1..29: note = Description of Artificial Sequence: Synthetic peptide
GSAPGEAGGYAFLRMGGSIATSGSETPGT

SEQ ID NO: 8395 - protein, 29 aa, synthetic construct
  REGION 1..29: note = Description of Artificial Sequence: Synthetic peptide
GSAPGPGGGYASLRMGGTAATSGSETPGT

SEQ ID NO: 8396 - protein, 29 aa, synthetic construct
  REGION 1..29: note = Description of Artificial Sequence: Synthetic peptide
GSAPGSEGGYATLRMGGAIATSGSETPGT

SEQ ID NO: 8397 - protein, 29 aa, synthetic construct
  REGION 1..29: note = Description of Artificial Sequence: Synthetic peptide
GSAPGTPGGYANLRMGGGAATSGSETPGT

SEQ ID NO: 8398 - protein, 29 aa, synthetic construct
  REGION 1..29: note = Description of Artificial Sequence: Synthetic peptide
GSAPGASGGYAHLRMGGEIATSGSETPGT

SEQ ID NO: 8399 - protein, 29 aa, synthetic construct
  REGION 1..29: note = Description of Artificial Sequence: Synthetic peptide
GSAPGGTGGYGELRMGGPAATSGSETPGT

SEQ ID NO: 8400 - protein, 29 aa, synthetic construct
  REGION 1..29: note = Description of Artificial Sequence: Synthetic peptide
GSAPGEAGGYPELRMGGSIATSGSETPGT

SEQ ID NO: 8401 - protein, 29 aa, synthetic construct
  REGION 1..29: note = Description of Artificial Sequence: Synthetic peptide
GSAPGPGGGYVELRMGGTAATSGSETPGT

SEQ ID NO: 8402 - protein, 29 aa, synthetic construct
  REGION 1..29: note = Description of Artificial Sequence: Synthetic peptide
GSAPGSEGGYLELRMGGAIATSGSETPGT

SEQ ID NO: 8403 - protein, 29 aa, synthetic construct
  REGION 1..29: note = Description of Artificial Sequence: Synthetic peptide
GSAPGTPGGYSELRMGGGAATSGSETPGT

SEQ ID NO: 8404 - protein, 29 aa, synthetic construct
  REGION 1..29: note = Description of Artificial Sequence: Synthetic peptide
GSAPGASGGYTELRMGGEIATSGSETPGT

SEQ ID NO: 8405 - protein, 29 aa, synthetic construct
  REGION 1..29: note = Description of Artificial Sequence: Synthetic peptide
GSAPGGTGGYQELRMGGPAATSGSETPGT

SEQ ID NO: 8406 - protein, 29 aa, synthetic construct
  REGION 1..29: note = Description of Artificial Sequence: Synthetic peptide
GSAPGEAGGYEELRMGGSIATSGSETPGT

SEQ ID NO: 8407 - protein, 29 aa, synthetic construct
  REGION 1..29: note = Description of Artificial Sequence: Synthetic peptide
GSAPGPGIGPAELRMGGTAATSGSETPGT

SEQ ID NO: 8408 - protein, 29 aa, synthetic construct
  REGION 1..29: note = Description of Artificial Sequence: Synthetic peptide
GSAPGSEIGAAELRMGGAIATSGSETPGT

SEQ ID NO: 8409 - protein, 29 aa, synthetic construct
  REGION 1..29: note = Description of Artificial Sequence: Synthetic peptide
GSAPGTPIGSAELRMGGGAATSGSETPGT

SEQ ID NO: 8410 - protein, 29 aa, synthetic construct
  REGION 1..29: note = Description of Artificial Sequence: Synthetic peptide
GSAPGASIGTAELRMGGEIATSGSETPGT

SEQ ID NO: 8411 - protein, 29 aa, synthetic construct
  REGION 1..29: note = Description of Artificial Sequence: Synthetic peptide
GSAPGGTIGNAELRMGGPAATSGSETPGT

SEQ ID NO: 8412 - protein, 29 aa, synthetic construct
  REGION 1..29: note = Description of Artificial Sequence: Synthetic peptide
GSAPGEAIGQAELRMGGSIATSGSETPGT

SEQ ID NO: 8413 - protein, 29 aa, synthetic construct
  REGION 1..29: note = Description of Artificial Sequence: Synthetic peptide
GSAPGPGGPYAELRMGGTAATSGSETPGT

SEQ ID NO: 8414 - protein, 29 aa, synthetic construct
  REGION 1..29: note = Description of Artificial Sequence: Synthetic peptide
GSAPGSEGAYAELRMGGAIATSGSETPGT

SEQ ID NO: 8415 - protein, 29 aa, synthetic construct
  REGION 1..29: note = Description of Artificial Sequence: Synthetic peptide
GSAPGTPGVYAELRMGGGAATSGSETPGT

SEQ ID NO: 8416 - protein, 29 aa, synthetic construct
  REGION 1..29: note = Description of Artificial Sequence: Synthetic peptide
GSAPGASGLYAELRMGGEIATSGSETPGT

SEQ ID NO: 8417 - protein, 29 aa, synthetic construct
  REGION 1..29: note = Description of Artificial Sequence: Synthetic peptide
GSAPGGTGIYAELRMGGPAATSGSETPGT

SEQ ID NO: 8418 - protein, 29 aa, synthetic construct
  REGION 1..29: note = Description of Artificial Sequence: Synthetic peptide
GSAPGEAGFYAELRMGGSIATSGSETPGT

SEQ ID NO: 8419 - protein, 29 aa, synthetic construct
  REGION 1..29: note = Description of Artificial Sequence: Synthetic peptide
GSAPGPGGYYAELRMGGTAATSGSETPGT

SEQ ID NO: 8420 - protein, 29 aa, synthetic construct
  REGION 1..29: note = Description of Artificial Sequence: Synthetic peptide
GSAPGSEGSYAELRMGGAIATSGSETPGT

SEQ ID NO: 8421 - protein, 29 aa, synthetic construct
  REGION 1..29: note = Description of Artificial Sequence: Synthetic peptide
GSAPGTPGNYAELRMGGGAATSGSETPGT

SEQ ID NO: 8422 - protein, 29 aa, synthetic construct
  REGION 1..29: note = Description of Artificial Sequence: Synthetic peptide
GSAPGASGEYAELRMGGEIATSGSETPGT

SEQ ID NO: 8423 - protein, 29 aa, synthetic construct
  REGION 1..29: note = Description of Artificial Sequence: Synthetic peptide
GSAPGGTGHYAELRMGGPAATSGSETPGT

SEQ ID NO: 8424 - protein, 29 aa, synthetic construct
  REGION 1..29: note = Description of Artificial Sequence: Synthetic peptide
GSAPGEAGGYAEARMGGSIATSGSETPGT

SEQ ID NO: 8425 - protein, 29 aa, synthetic construct
  REGION 1..29: note = Description of Artificial Sequence: Synthetic peptide
GSAPGPGGGYAEVRMGGTAATSGSETPGT

SEQ ID NO: 8426 - protein, 29 aa, synthetic construct
  REGION 1..29: note = Description of Artificial Sequence: Synthetic peptide
GSAPGSEGGYAEIRMGGAIATSGSETPGT

SEQ ID NO: 8427 - protein, 29 aa, synthetic construct
  REGION 1..29: note = Description of Artificial Sequence: Synthetic peptide
GSAPGTPGGYAEFRMGGGAATSGSETPGT

SEQ ID NO: 8428 - protein, 29 aa, synthetic construct
  REGION 1..29: note = Description of Artificial Sequence: Synthetic peptide
GSAPGASGGYAEYRMGGEIATSGSETPGT

SEQ ID NO: 8429 - protein, 29 aa, synthetic construct
  REGION 1..29: note = Description of Artificial Sequence: Synthetic peptide
GSAPGGTGGYAESRMGGPAATSGSETPGT

SEQ ID NO: 8430 - protein, 29 aa, synthetic construct
  REGION 1..29: note = Description of Artificial Sequence: Synthetic peptide
GSAPGEAGGYAETRMGGSIATSGSETPGT

SEQ ID NO: 8431 - protein, 29 aa, synthetic construct
  REGION 1..29: note = Description of Artificial Sequence: Synthetic peptide
GSAPGPGGGYAELAMGGTRATSGSETPGT

SEQ ID NO: 8432 - protein, 29 aa, synthetic construct
  REGION 1..29: note = Description of Artificial Sequence: Synthetic peptide
GSAPGSEGGYAELVMGGARATSGSETPGT

SEQ ID NO: 8433 - protein, 29 aa, synthetic construct
  REGION 1..29: note = Description of Artificial Sequence: Synthetic peptide
GSAPGTPGGYAELLMGGGRATSGSETPGT

SEQ ID NO: 8434 - protein, 29 aa, synthetic construct
  REGION 1..29: note = Description of Artificial Sequence: Synthetic peptide
GSAPGASGGYAELIMGGERATSGSETPGT

SEQ ID NO: 8435 - protein, 29 aa, synthetic construct
  REGION 1..29: note = Description of Artificial Sequence: Synthetic peptide
GSAPGGTGGYAELWMGGPRATSGSETPGT

SEQ ID NO: 8436 - protein, 29 aa, synthetic construct
  REGION 1..29: note = Description of Artificial Sequence: Synthetic peptide
GSAPGEAGGYAELSMGGSRATSGSETPGT

SEQ ID NO: 8437 - protein, 29 aa, synthetic construct
  REGION 1..29: note = Description of Artificial Sequence: Synthetic peptide
GSAPGPGGGYAELTMGGTRATSGSETPGT

SEQ ID NO: 8438 - protein, 29 aa, synthetic construct
  REGION 1..29: note = Description of Artificial Sequence: Synthetic peptide
GSAPGSEGGYAELQMGGARATSGSETPGT

SEQ ID NO: 8439 - protein, 29 aa, synthetic construct
  REGION 1..29: note = Description of Artificial Sequence: Synthetic peptide
GSAPGTPGGYAELNMGGGRATSGSETPGT

SEQ ID NO: 8440 - protein, 29 aa, synthetic construct
  REGION 1..29: note = Description of Artificial Sequence: Synthetic peptide
GSAPGASGGYAELEMGGERATSGSETPGT

SEQ ID NO: 8441 - protein, 29 aa, synthetic construct
  REGION 1..29: note = Description of Artificial Sequence: Synthetic peptide
GSAPGGTGGYAELRPGGPIATSGSETPGT

SEQ ID NO: 8442 - protein, 29 aa, synthetic construct
  REGION 1..29: note = Description of Artificial Sequence: Synthetic peptide
GSAPGEAGGYAELRAGGSAATSGSETPGT

SEQ ID NO: 8443 - protein, 29 aa, synthetic construct
  REGION 1..29: note = Description of Artificial Sequence: Synthetic peptide
GSAPGPGGGYAELRLGGTIATSGSETPGT

SEQ ID NO: 8444 - protein, 29 aa, synthetic construct
  REGION 1..29: note = Description of Artificial Sequence: Synthetic peptide
GSAPGSEGGYAELRIGGAAATSGSETPGT

SEQ ID NO: 8445 - protein, 29 aa, synthetic construct
  REGION 1..29: note = Description of Artificial Sequence: Synthetic peptide
GSAPGTPGGYAELRSGGGIATSGSETPGT

SEQ ID NO: 8446 - protein, 29 aa, synthetic construct
  REGION 1..29: note = Description of Artificial Sequence: Synthetic peptide
GSAPGASGGYAELRNGGEAATSGSETPGT

SEQ ID NO: 8447 - protein, 29 aa, synthetic construct
  REGION 1..29: note = Description of Artificial Sequence: Synthetic peptide
GSAPGGTGGYAELRQGGPIATSGSETPGT

SEQ ID NO: 8448 - protein, 29 aa, synthetic construct
  REGION 1..29: note = Description of Artificial Sequence: Synthetic peptide
GSAPGEAGGYAELRDGGSAATSGSETPGT

SEQ ID NO: 8449 - protein, 29 aa, synthetic construct
  REGION 1..29: note = Description of Artificial Sequence: Synthetic peptide
GSAPGPGGGYAELREGGTIATSGSETPGT

SEQ ID NO: 8450 - protein, 29 aa, synthetic construct
  REGION 1..29: note = Description of Artificial Sequence: Synthetic peptide
GSAPGSEGGYAELRHGGAAATSGSETPGT

SEQ ID NO: 8451 - protein, 29 aa, synthetic construct
  REGION 1..29: note = Description of Artificial Sequence: Synthetic peptide
GSAPGTPGGYAELRMPGGIATSGSETPGT

SEQ ID NO: 8452 - protein, 29 aa, synthetic construct
  REGION 1..29: note = Description of Artificial Sequence: Synthetic peptide
GSAPGASGGYAELRMAGEAATSGSETPGT

SEQ ID NO: 8453 - protein, 29 aa, synthetic construct
  REGION 1..29: note = Description of Artificial Sequence: Synthetic peptide
GSAPGGTGGYAELRMVGPIATSGSETPGT

SEQ ID NO: 8454 - protein, 29 aa, synthetic construct
  REGION 1..29: note = Description of Artificial Sequence: Synthetic peptide
GSAPGEAGGYAELRMLGSAATSGSETPGT

SEQ ID NO: 8455 - protein, 29 aa, synthetic construct
  REGION 1..29: note = Description of Artificial Sequence: Synthetic peptide
GSAPGPGGGYAELRMIGTIATSGSETPGT

SEQ ID NO: 8456 - protein, 29 aa, synthetic construct
  REGION 1..29: note = Description of Artificial Sequence: Synthetic peptide
GSAPGSEGGYAELRMYGAIATSGSETPGT

SEQ ID NO: 8457 - protein, 29 aa, synthetic construct
  REGION 1..29: note = Description of Artificial Sequence: Synthetic peptide
GSAPGTPGGYAELRMSGGAATSGSETPGT

SEQ ID NO: 8458 - protein, 29 aa, synthetic construct
  REGION 1..29: note = Description of Artificial Sequence: Synthetic peptide
GSAPGASGGYAELRMNGEIATSGSETPGT

SEQ ID NO: 8459 - protein, 29 aa, synthetic construct
  REGION 1..29: note = Description of Artificial Sequence: Synthetic peptide
GSAPGGTGGYAELRMQGPAATSGSETPGT

SEQ ID NO: 8460 - protein, 29 aa, synthetic construct
  REGION 1..29: note = Description of Artificial Sequence: Synthetic peptide
GSAPGANHTPAGLTGPGARATSGSETPGT

SEQ ID NO: 8461 - protein, 29 aa, synthetic construct
  REGION 1..29: note = Description of Artificial Sequence: Synthetic peptide
GSAPGANTAPEGLTGPSTRATSGSETPGT

SEQ ID NO: 8462 - protein, 29 aa, synthetic construct
  REGION 1..29: note = Description of Artificial Sequence: Synthetic peptide
GSAPGTGAPPGGLTGPGTRATSGSETPGT

SEQ ID NO: 8463 - protein, 29 aa, synthetic construct
  REGION 1..29: note = Description of Artificial Sequence: Synthetic peptide
GSAPGANHEPSGLTEGSPRATSGSETPGT

SEQ ID NO: 8464 - protein, 29 aa, synthetic construct
  REGION 1..29: note = Description of Artificial Sequence: Synthetic peptide
GSAPGANTEPPELGAGTERATSGSETPGT

SEQ ID NO: 8465 - protein, 29 aa, synthetic construct
  REGION 1..29: note = Description of Artificial Sequence: Synthetic peptide
GSAPGASGPPPGLTGPPGRATSGSETPGT

SEQ ID NO: 8466 - protein, 29 aa, synthetic construct
  REGION 1..29: note = Description of Artificial Sequence: Synthetic peptide
GSAPGASGTPAPLGGEPGRATSGSETPGT

SEQ ID NO: 8467 - protein, 29 aa, synthetic construct
  REGION 1..29: note = Description of Artificial Sequence: Synthetic peptide
GSAPGPAGPPEGLETEAGRATSGSETPGT

SEQ ID NO: 8468 - protein, 29 aa, synthetic construct
  REGION 1..29: note = Description of Artificial Sequence: Synthetic peptide
GSAPGPTSGQGGLTGPESRATSGSETPGT

SEQ ID NO: 8469 - protein, 29 aa, synthetic construct
  REGION 1..29: note = Description of Artificial Sequence: Synthetic peptide
GSAPGSAGGAANLVRGGAIATSGSETPGT

SEQ ID NO: 8470 - protein, 29 aa, synthetic construct
  REGION 1..29: note = Description of Artificial Sequence: Synthetic peptide
GSAPGTGGGAAPLVRGGGAATSGSETPGT

SEQ ID NO: 8471 - protein, 29 aa, synthetic construct
  REGION 1..29: note = Description of Artificial Sequence: Synthetic peptide
GSAPGAEGGAAALVRGGEIATSGSETPGT

SEQ ID NO: 8472 - protein, 29 aa, synthetic construct
  REGION 1..29: note = Description of Artificial Sequence: Synthetic peptide
GSAPGGPGGAALLVRGGPAATSGSETPGT

SEQ ID NO: 8473 - protein, 29 aa, synthetic construct
  REGION 1..29: note = Description of Artificial Sequence: Synthetic peptide
GSAPGEAGGAAFLVRGGSIATSGSETPGT

SEQ ID NO: 8474 - protein, 29 aa, synthetic construct
  REGION 1..29: note = Description of Artificial Sequence: Synthetic peptide
GSAPGPGGGAASLVRGGTAATSGSETPGT

SEQ ID NO: 8475 - protein, 29 aa, synthetic construct
  REGION 1..29: note = Description of Artificial Sequence: Synthetic peptide
GSAPGSEGGAATLVRGGAIATSGSETPGT

SEQ ID NO: 8476 - protein, 29 aa, synthetic construct
  REGION 1..29: note = Description of Artificial Sequence: Synthetic peptide
GSAPGTPGGAAGLVRGGGAATSGSETPGT

SEQ ID NO: 8477 - protein, 29 aa, synthetic construct
  REGION 1..29: note = Description of Artificial Sequence: Synthetic peptide
GSAPGASGGAADLVRGGEIATSGSETPGT

SEQ ID NO: 8478 - protein, 29 aa, synthetic construct
  REGION 1..29: note = Description of Artificial Sequence: Synthetic peptide
GSAPGGTGGAGNLVRGGPAATSGSETPGT

SEQ ID NO: 8479 - protein, 29 aa, synthetic construct
  REGION 1..29: note = Description of Artificial Sequence: Synthetic peptide
GSAPGEAGGAPNLVRGGSIATSGSETPGT

SEQ ID NO: 8480 - protein, 29 aa, synthetic construct
  REGION 1..29: note = Description of Artificial Sequence: Synthetic peptide
GSAPGPGGGAVNLVRGGTAATSGSETPGT

SEQ ID NO: 8481 - protein, 29 aa, synthetic construct
  REGION 1..29: note = Description of Artificial Sequence: Synthetic peptide
GSAPGSEGGALNLVRGGAIATSGSETPGT

SEQ ID NO: 8482 - protein, 29 aa, synthetic construct
  REGION 1..29: note = Description of Artificial Sequence: Synthetic peptide
GSAPGTPGGASNLVRGGGAATSGSETPGT

SEQ ID NO: 8483 - protein, 29 aa, synthetic construct
  REGION 1..29: note = Description of Artificial Sequence: Synthetic peptide
GSAPGASGGATNLVRGGEIATSGSETPGT

SEQ ID NO: 8484 - protein, 29 aa, synthetic construct
  REGION 1..29: note = Description of Artificial Sequence: Synthetic peptide
GSAPGGTGGAQNLVRGGPAATSGSETPGT

SEQ ID NO: 8485 - protein, 29 aa, synthetic construct
  REGION 1..29: note = Description of Artificial Sequence: Synthetic peptide
GSAPGEAGGAENLVRGGSIATSGSETPGT

SEQ ID NO: 8486 - protein, 30 aa, synthetic construct
  REGION 1..30: note = Description of Artificial Sequence: Synthetic polypeptide
GSAPEAGRSANHEPLGLVATATSGSETPGT

SEQ ID NO: 8487 - protein, 30 aa, synthetic construct
  REGION 1..30: note = Description of Artificial Sequence: Synthetic polypeptide
GSAPASGRSTNAGPSGLAGPATSGSETPGT

SEQ ID NO: 8488 - protein, 30 aa, synthetic construct
  REGION 1..30: note = Description of Artificial Sequence: Synthetic polypeptide
GSAPASGRSTNAGPQGLAGQATSGSETPGT

SEQ ID NO: 8489 - protein, 30 aa, synthetic construct
  REGION 1..30: note = Description of Artificial Sequence: Synthetic polypeptide
GSAPASGRSTNAGPPGLTGPATSGSETPGT

SEQ ID NO: 8490 - protein, 30 aa, synthetic construct
  REGION 1..30: note = Description of Artificial Sequence: Synthetic polypeptide
GSAPASSRGTNAGPAGLTGPATSGSETPGT

SEQ ID NO: 8491 - protein, 30 aa, synthetic construct
  REGION 1..30: note = Description of Artificial Sequence: Synthetic polypeptide
GSAPASSRTTNTGPSTLTGPATSGSETPGT

SEQ ID NO: 8492 - protein, 30 aa, synthetic construct
  REGION 1..30: note = Description of Artificial Sequence: Synthetic polypeptide
GSAPAAGRSDNGTPLELVAPATSGSETPGT

SEQ ID NO: 8493 - protein, 30 aa, synthetic construct
  REGION 1..30: note = Description of Artificial Sequence: Synthetic polypeptide
GSAPASGRGTNAGPAGLTGPATSGSETPGT

SEQ ID NO: 8494 - protein, 30 aa, synthetic construct
  REGION 1..30: note = Description of Artificial Sequence: Synthetic polypeptide
GSAPLFGRNDNHEPLELGGGATSGSETPGT

SEQ ID NO: 8495 - protein, 30 aa, synthetic construct
  REGION 1..30: note = Description of Artificial Sequence: Synthetic polypeptide
GSAPTAGRSDNLEPLGLVFGATSGSETPGT

SEQ ID NO: 8496 - protein, 30 aa, synthetic construct
  REGION 1..30: note = Description of Artificial Sequence: Synthetic polypeptide
GSAPLDGRSDNFHPPELVAGATSGSETPGT

SEQ ID NO: 8497 - protein, 30 aa, synthetic construct
  REGION 1..30: note = Description of Artificial Sequence: Synthetic polypeptide
GSAPLEGRSDNEEPENLVAGATSGSETPGT

SEQ ID NO: 8498 - protein, 30 aa, synthetic construct
  REGION 1..30: note = Description of Artificial Sequence: Synthetic polypeptide
GSAPLKGRSDNNAPLALVAGATSGSETPGT

SEQ ID NO: 8499 - protein, 30 aa, synthetic construct
  REGION 1..30: note = Description of Artificial Sequence: Synthetic polypeptide
GSAPVYSRGTNAGPHGLTGRATSGSETPGT

SEQ ID NO: 8500 - protein, 30 aa, synthetic construct
  REGION 1..30: note = Description of Artificial Sequence: Synthetic polypeptide
GSAPANSRGTNKGFAGLIGPATSGSETPGT

SEQ ID NO: 8501 - protein, 30 aa, synthetic construct
  REGION 1..30: note = Description of Artificial Sequence: Synthetic polypeptide
GSAPASSRLTNEAPAGLTIPATSGSETPGT

SEQ ID NO: 8502 - protein, 30 aa, synthetic construct
  REGION 1..30: note = Description of Artificial Sequence: Synthetic polypeptide
GSAPDQSRGTNAGPEGLTDPATSGSETPGT

SEQ ID NO: 8503 - protein, 30 aa, synthetic construct
  REGION 1..30: note = Description of Artificial Sequence: Synthetic polypeptide
GSAPESSRGTNIGQGGLTGPATSGSETPGT

SEQ ID NO: 8504 - protein, 30 aa, synthetic construct
  REGION 1..30: note = Description of Artificial Sequence: Synthetic polypeptide
GSAPSSSRGTNQDPAGLTIPATSGSETPGT

SEQ ID NO: 8505 - protein, 30 aa, synthetic construct
  REGION 1..30: note = Description of Artificial Sequence: Synthetic polypeptide
GSAPASSRGQNHSPMGLTGPATSGSETPGT

SEQ ID NO: 8506 - protein, 30 aa, synthetic construct
  REGION 1..30: note = Description of Artificial Sequence: Synthetic polypeptide
GSAPAYSRGPNAGPAGLEGRATSGSETPGT

SEQ ID NO: 8507 - protein, 30 aa, synthetic construct
  REGION 1..30: note = Description of Artificial Sequence: Synthetic polypeptide
GSAPASERGNNAGPANLTGFATSGSETPGT

SEQ ID NO: 8508 - protein, 30 aa, synthetic construct
  REGION 1..30: note = Description of Artificial Sequence: Synthetic polypeptide
GSAPASHRGTNPKPAILTGPATSGSETPGT

SEQ ID NO: 8509 - protein, 30 aa, synthetic construct
  REGION 1..30: note = Description of Artificial Sequence: Synthetic polypeptide
GSAPMSSRRTNANPAQLTGPATSGSETPGT

SEQ ID NO: 8510 - protein, 30 aa, synthetic construct
  REGION 1..30: note = Description of Artificial Sequence: Synthetic polypeptide
GSAPGAGRTDNHEPLELGAAATSGSETPGT

SEQ ID NO: 8511 - protein, 30 aa, synthetic construct
  REGION 1..30: note = Description of Artificial Sequence: Synthetic polypeptide
GSAPLAGRSENTAPLELTAGATSGSETPGT

SEQ ID NO: 8512 - protein, 30 aa, synthetic construct
  REGION 1..30: note = Description of Artificial Sequence: Synthetic polypeptide
GSAPLEGRPDNHEPLALVASATSGSETPGT

SEQ ID NO: 8513 - protein, 30 aa, synthetic construct
  REGION 1..30: note = Description of Artificial Sequence: Synthetic polypeptide
GSAPLSGRSDNEEPLALPAGATSGSETPGT

SEQ ID NO: 8514 - protein, 30 aa, synthetic construct
  REGION 1..30: note = Description of Artificial Sequence: Synthetic polypeptide
GSAPEAGRTDNHEPLELSAPATSGSETPGT

SEQ ID NO: 8515 - protein, 30 aa, synthetic construct
  REGION 1..30: note = Description of Artificial Sequence: Synthetic polypeptide
GSAPEGGRSDNHGPLELVSGATSGSETPGT

SEQ ID NO: 8516 - protein, 30 aa, synthetic construct
  REGION 1..30: note = Description of Artificial Sequence: Synthetic polypeptide
GSAPLSGRSDNEAPLELEAGATSGSETPGT

SEQ ID NO: 8517 - protein, 30 aa, synthetic construct
  REGION 1..30: note = Description of Artificial Sequence: Synthetic polypeptide
GSAPLGGRADNHEPPELGAGATSGSETPGT

SEQ ID NO: 8518 - protein, 30 aa, synthetic construct
  REGION 1..30: note = Description of Artificial Sequence: Synthetic polypeptide
GSAPPPSRGTNAEPAGLTGEATSGSETPGT

SEQ ID NO: 8519 - protein, 30 aa, synthetic construct
  REGION 1..30: note = Description of Artificial Sequence: Synthetic polypeptide
GSAPASTRGENAGPAGLEAPATSGSETPGT

SEQ ID NO: 8520 - protein, 30 aa, synthetic construct
  REGION 1..30: note = Description of Artificial Sequence: Synthetic polypeptide
GSAPESSRGTNGAPEGLTGPATSGSETPGT

SEQ ID NO: 8521 - protein, 30 aa, synthetic construct
  REGION 1..30: note = Description of Artificial Sequence: Synthetic polypeptide
GSAPASSRATNESPAGLTGEATSGSETPGT

SEQ ID NO: 8522 - protein, 30 aa, synthetic construct
  REGION 1..30: note = Description of Artificial Sequence: Synthetic polypeptide
GSAPASSRGENPPPGGLTGPATSGSETPGT

SEQ ID NO: 8523 - protein, 30 aa, synthetic construct
  REGION 1..30: note = Description of Artificial Sequence: Synthetic polypeptide
GSAPAASRGTNTGPAELTGSATSGSETPGT

SEQ ID NO: 8524 - protein, 30 aa, synthetic construct
  REGION 1..30: note = Description of Artificial Sequence: Synthetic polypeptide
GSAPAGSRTTNAGPGGLEGPATSGSETPGT

SEQ ID NO: 8525 - protein, 30 aa, synthetic construct
  REGION 1..30: note = Description of Artificial Sequence: Synthetic polypeptide
GSAPAPSRGENAGPATLTGAATSGSETPGT

SEQ ID NO: 8526 - protein, 30 aa, synthetic construct
  REGION 1..30: note = Description of Artificial Sequence: Synthetic polypeptide
GSAPESGRAANTGPPTLTAPATSGSETPGT

SEQ ID NO: 8527 - protein, 30 aa, synthetic construct
  REGION 1..30: note = Description of Artificial Sequence: Synthetic polypeptide
GSAPNPGRAANEGPPGLPGSATSGSETPGT

SEQ ID NO: 8528 - protein, 30 aa, synthetic construct
  REGION 1..30: note = Description of Artificial Sequence: Synthetic polypeptide
GSAPESSRAANLTPPELTGPATSGSETPGT

SEQ ID NO: 8529 - protein, 30 aa, synthetic construct
  REGION 1..30: note = Description of Artificial Sequence: Synthetic polypeptide
GSAPASGRAANETPPGLTGAATSGSETPGT

SEQ ID NO: 8530 - protein, 30 aa, synthetic construct
  REGION 1..30: note = Description of Artificial Sequence: Synthetic polypeptide
GSAPNSGRGENLGAPGLTGTATSGSETPGT

SEQ ID NO: 8531 - protein, 30 aa, synthetic construct
  REGION 1..30: note = Description of Artificial Sequence: Synthetic polypeptide
GSAPTTGRAANLTPAGLTGPATSGSETPGT

SEQ ID NO: 8532 - protein, 30 aa, synthetic construct
  REGION 1..30: note = Description of Artificial Sequence: Synthetic polypeptide
GSAPEAGRSANHTPAGLTGPATSGSETPGT

SEQ ID NO: 8533 - protein, 30 aa, synthetic construct
  REGION 1..30: note = Description of Artificial Sequence: Synthetic polypeptide
GSAPESGRAANTTPAGLTGPATSGSETPGT

SEQ ID NO: 8534 - protein, 33 aa, synthetic construct
  REGION 1..33: note = Description of Artificial Sequence: Synthetic polypeptide
GSAPTTGRATEAANLTPAGLTGPATSGSETPGT

SEQ ID NO: 8535 - protein, 33 aa, synthetic construct
  REGION 1..33: note = Description of Artificial Sequence: Synthetic polypeptide
GSAPTTGRAEEAANLTPAGLTGPATSGSETPGT

SEQ ID NO: 8536 - protein, 33 aa, synthetic construct
  REGION 1..33: note = Description of Artificial Sequence: Synthetic polypeptide
GSAPTTGRAGEAANLTPAGLTGPATSGSETPGT

SEQ ID NO: 8537 - protein, 33 aa, synthetic construct
  REGION 1..33: note = Description of Artificial Sequence: Synthetic polypeptide
GSAPTTGRATEAANATPAGLTGPATSGSETPGT

SEQ ID NO: 8538 - protein, 33 aa, synthetic construct
  REGION 1..33: note = Description of Artificial Sequence: Synthetic polypeptide
GSAPTTGRAGEAEGATSAGATGPATSGSETPGT

SEQ ID NO: 8539 - protein, 33 aa, synthetic construct
  REGION 1..33: note = Description of Artificial Sequence: Synthetic polypeptide
GSAPTTGEAGEAANATSAGATGPATSGSETPGT

SEQ ID NO: 8540 - protein, 33 aa, synthetic construct
  REGION 1..33: note = Description of Artificial Sequence: Synthetic polypeptide
GSAPTTGEAGEAAGLTPAGLTGPATSGSETPGT

SEQ ID NO: 8541 - protein, 33 aa, synthetic construct
  REGION 1..33: note = Description of Artificial Sequence: Synthetic polypeptide
GSAPTTGAAGEAANATPAGLTGPATSGSETPGT

SEQ ID NO: 8542 - protein, 33 aa, synthetic construct
  REGION 1..33: note = Description of Artificial Sequence: Synthetic polypeptide
GSAPTTGRAGEAAGLTPAGLTGPATSGSETPGT

SEQ ID NO: 8543 - protein, 33 aa, synthetic construct
  REGION 1..33: note = Description of Artificial Sequence: Synthetic polypeptide
GSAPTTGRAGEAANATSAGATGPATSGSETPGT

SEQ ID NO: 8544 - protein, 33 aa, synthetic construct
  REGION 1..33: note = Description of Artificial Sequence: Synthetic polypeptide
GSAPTTGEAGEAAGATSAGATGPATSGSETPGT

SEQ ID NO: 8545 - protein, 30 aa, synthetic construct
  REGION 1..30: note = Description of Artificial Sequence: Synthetic polypeptide
GSAPESGRAANTEPPELGAGATSGSETPGT

SEQ ID NO: 8546 - protein, 30 aa, synthetic construct
  REGION 1..30: note = Description of Artificial Sequence: Synthetic polypeptide
GSAPESGRAANTAPEGLTGPATSGSETPGT

SEQ ID NO: 8547 - protein, 30 aa, synthetic construct
  REGION 1..30: note = Description of Artificial Sequence: Synthetic polypeptide
GSAPEPGRAANHEPSGLTEGATSGSETPGT

SEQ ID NO: 8548 - protein, 33 aa, synthetic construct
  REGION 1..33: note = Description of Artificial Sequence: Synthetic polypeptide
GSAPESGRAANHTGAPPGGLTGPATSGSETPGT

SEQ ID NO: 8549 - protein, 33 aa, synthetic construct
  REGION 1..33: note = Description of Artificial Sequence: Synthetic polypeptide
GSAPTTGRTGEGANATPGGLTGPATSGSETPGT

SEQ ID NO: 8550 - protein, 33 aa, synthetic construct
  REGION 1..33: note = Description of Artificial Sequence: Synthetic polypeptide
GSAPRTGRSGEAANETPEGLEGPATSGSETPGT

SEQ ID NO: 8551 - protein, 33 aa, synthetic construct
  REGION 1..33: note = Description of Artificial Sequence: Synthetic polypeptide
GSAPRTGRTGESANETPAGLGGPATSGSETPGT

SEQ ID NO: 8552 - protein, 33 aa, synthetic construct
  REGION 1..33: note = Description of Artificial Sequence: Synthetic polypeptide
GSAPSTGRTGEPANETPAGLSGPATSGSETPGT

SEQ ID NO: 8553 - protein, 33 aa, synthetic construct
  REGION 1..33: note = Description of Artificial Sequence: Synthetic polypeptide
GSAPTTGRAGEPANATPTGLSGPATSGSETPGT

SEQ ID NO: 8554 - protein, 33 aa, synthetic construct
  REGION 1..33: note = Description of Artificial Sequence: Synthetic polypeptide
GSAPRTGRPGEGANATPTGLPGPATSGSETPGT

SEQ ID NO: 8555 - protein, 33 aa, synthetic construct
  REGION 1..33: note = Description of Artificial Sequence: Synthetic polypeptide
GSAPRTGRGGEAANATPSGLGGPATSGSETPGT

SEQ ID NO: 8556 - protein, 33 aa, synthetic construct
  REGION 1..33: note = Description of Artificial Sequence: Synthetic polypeptide
GSAPSTGRSGESANATPGGLGGPATSGSETPGT

SEQ ID NO: 8557 - protein, 33 aa, synthetic construct
  REGION 1..33: note = Description of Artificial Sequence: Synthetic polypeptide
GSAPRTGRTGEEANATPAGLPGPATSGSETPGT

SEQ ID NO: 8558 - protein, 33 aa, synthetic construct
  REGION 1..33: note = Description of Artificial Sequence: Synthetic polypeptide
GSAPATGRPGEPANTTPEGLEGPATSGSETPGT

SEQ ID NO: 8559 - protein, 33 aa, synthetic construct
  REGION 1..33: note = Description of Artificial Sequence: Synthetic polypeptide
GSAPSTGRSGEPANATPGGLTGPATSGSETPGT

SEQ ID NO: 8560 - protein, 33 aa, synthetic construct
  REGION 1..33: note = Description of Artificial Sequence: Synthetic polypeptide
GSAPPTGRGGEGANTTPTGLPGPATSGSETPGT

SEQ ID NO: 8561 - protein, 33 aa, synthetic construct
  REGION 1..33: note = Description of Artificial Sequence: Synthetic polypeptide
GSAPPTGRSGEGANATPSGLTGPATSGSETPGT

SEQ ID NO: 8562 - protein, 33 aa, synthetic construct
  REGION 1..33: note = Description of Artificial Sequence: Synthetic polypeptide
GSAPTTGRASEGANSTPAPLTEPATSGSETPGT

SEQ ID NO: 8563 - protein, 33 aa, synthetic construct
  REGION 1..33: note = Description of Artificial Sequence: Synthetic polypeptide
GSAPTYGRAAEAANTTPAGLTAPATSGSETPGT

SEQ ID NO: 8564 - protein, 33 aa, synthetic construct
  REGION 1..33: note = Description of Artificial Sequence: Synthetic polypeptide
GSAPTTGRATEGANATPAELTEPATSGSETPGT

SEQ ID NO: 8565 - protein, 33 aa, synthetic construct
  REGION 1..33: note = Description of Artificial Sequence: Synthetic polypeptide
GSAPTVGRASEEANTTPASLTGPATSGSETPGT

SEQ ID NO: 8566 - protein, 33 aa, synthetic construct
  REGION 1..33: note = Description of Artificial Sequence: Synthetic polypeptide
GSAPTTGRAPEAANATPAPLTGPATSGSETPGT

SEQ ID NO: 8567 - protein, 33 aa, synthetic construct
  REGION 1..33: note = Description of Artificial Sequence: Synthetic polypeptide
GSAPTWGRATEPANATPAPLTSPATSGSETPGT

SEQ ID NO: 8568 - protein, 33 aa, synthetic construct
  REGION 1..33: note = Description of Artificial Sequence: Synthetic polypeptide
GSAPTVGRASESANATPAELTSPATSGSETPGT

SEQ ID NO: 8569 - protein, 33 aa, synthetic construct
  REGION 1..33: note = Description of Artificial Sequence: Synthetic polypeptide
GSAPTVGRAPEGANSTPAGLTGPATSGSETPGT

SEQ ID NO: 8570 - protein, 33 aa, synthetic construct
  REGION 1..33: note = Description of Artificial Sequence: Synthetic polypeptide
GSAPTWGRATEAPNLEPATLTTPATSGSETPGT

SEQ ID NO: 8571 - protein, 33 aa, synthetic construct
  REGION 1..33: note = Description of Artificial Sequence: Synthetic polypeptide
GSAPTTGRATEAPNLTPAPLTEPATSGSETPGT

SEQ ID NO: 8572 - protein, 33 aa, synthetic construct
  REGION 1..33: note = Description of Artificial Sequence: Synthetic polypeptide
GSAPTQGRATEAPNLSPAALTSPATSGSETPGT

SEQ ID NO: 8573 - protein, 33 aa, synthetic construct
  REGION 1..33: note = Description of Artificial Sequence: Synthetic polypeptide
GSAPTQGRAAEAPNLTPATLTAPATSGSETPGT

SEQ ID NO: 8574 - protein, 33 aa, synthetic construct
  REGION 1..33: note = Description of Artificial Sequence: Synthetic polypeptide
GSAPTSGRAPEATNLAPAPLTGPATSGSETPGT

SEQ ID NO: 8575 - protein, 33 aa, synthetic construct
  REGION 1..33: note = Description of Artificial Sequence: Synthetic polypeptide
GSAPTQGRAAEAANLTPAGLTEPATSGSETPGT

SEQ ID NO: 8576 - protein, 33 aa, synthetic construct
  REGION 1..33: note = Description of Artificial Sequence: Synthetic polypeptide
GSAPTTGRAGSAPNLPPTGLTTPATSGSETPGT

SEQ ID NO: 8577 - protein, 33 aa, synthetic construct
  REGION 1..33: note = Description of Artificial Sequence: Synthetic polypeptide
GSAPTTGRAGGAENLPPEGLTAPATSGSETPGT

SEQ ID NO: 8578 - protein, 33 aa, synthetic construct
  REGION 1..33: note = Description of Artificial Sequence: Synthetic polypeptide
GSAPTTSRAGTATNLTPEGLTAPATSGSETPGT

SEQ ID NO: 8579 - protein, 33 aa, synthetic construct
  REGION 1..33: note = Description of Artificial Sequence: Synthetic polypeptide
GSAPTTGRAGTATNLPPSGLTTPATSGSETPGT

SEQ ID NO: 8580 - protein, 33 aa, synthetic construct
  REGION 1..33: note = Description of Artificial Sequence: Synthetic polypeptide
GSAPTTARAGEAENLSPSGLTAPATSGSETPGT

SEQ ID NO: 8581 - protein, 33 aa, synthetic construct
  REGION 1..33: note = Description of Artificial Sequence: Synthetic polypeptide
GSAPTTGRAGGAGNLAPGGLTEPATSGSETPGT

SEQ ID NO: 8582 - protein, 33 aa, synthetic construct
  REGION 1..33: note = Description of Artificial Sequence: Synthetic polypeptide
GSAPTTGRAGTATNLPPEGLTGPATSGSETPGT

SEQ ID NO: 8583 - protein, 33 aa, synthetic construct
  REGION 1..33: note = Description of Artificial Sequence: Synthetic polypeptide
GSAPTTGRAGGAANLAPTGLTEPATSGSETPGT

SEQ ID NO: 8584 - protein, 33 aa, synthetic construct
  REGION 1..33: note = Description of Artificial Sequence: Synthetic polypeptide
GSAPTTGRAGTAENLAPSGLTTPATSGSETPGT

SEQ ID NO: 8585 - protein, 33 aa, synthetic construct
  REGION 1..33: note = Description of Artificial Sequence: Synthetic polypeptide
GSAPTTGRAGSATNLGPGGLTGPATSGSETPGT

SEQ ID NO: 8586 - protein, 33 aa, synthetic construct
  REGION 1..33: note = Description of Artificial Sequence: Synthetic polypeptide
GSAPTTARAGGAENLTPAGLTEPATSGSETPGT

SEQ ID NO: 8587 - protein, 33 aa, synthetic construct
  REGION 1..33: note = Description of Artificial Sequence: Synthetic polypeptide
GSAPTTARAGSAENLSPSGLTGPATSGSETPGT

SEQ ID NO: 8588 - protein, 33 aa, synthetic construct
  REGION 1..33: note = Description of Artificial Sequence: Synthetic polypeptide
GSAPTTARAGGAGNLAPEGLTTPATSGSETPGT

SEQ ID NO: 8589 - protein, 33 aa, synthetic construct
  REGION 1..33: note = Description of Artificial Sequence: Synthetic polypeptide
GSAPTTSRAGAAENLTPTGLTGPATSGSETPGT

SEQ ID NO: 8590 - protein, 33 aa, synthetic construct
  REGION 1..33: note = Description of Artificial Sequence: Synthetic polypeptide
GSAPTYGRTTTPGNEPPASLEAEATSGSETPGT

SEQ ID NO: 8591 - protein, 33 aa, synthetic construct
  REGION 1..33: note = Description of Artificial Sequence: Synthetic polypeptide
GSAPTYSRGESGPNEPPPGLTGPATSGSETPGT

SEQ ID NO: 8592 - protein, 33 aa, synthetic construct
  REGION 1..33: note = Description of Artificial Sequence: Synthetic polypeptide
GSAPAWGRTGASENETPAPLGGEATSGSETPGT

SEQ ID NO: 8593 - protein, 33 aa, synthetic construct
  REGION 1..33: note = Description of Artificial Sequence: Synthetic polypeptide
GSAPRWGRAETTPNTPPEGLETEATSGSETPGT

SEQ ID NO: 8594 - protein, 33 aa, synthetic construct
  REGION 1..33: note = Description of Artificial Sequence: Synthetic polypeptide
GSAPESGRAANHTGAEPPELGAGATSGSETPGT

SEQ ID NO: 8595 - protein, 33 aa, synthetic construct
  REGION 1..33: note = Description of Artificial Sequence: Synthetic polypeptide
GSAPTTGRAGEAANLTPAGLTESATSGSETPGT

SEQ ID NO: 8596 - protein, 33 aa, synthetic construct
  REGION 1..33: note = Description of Artificial Sequence: Synthetic polypeptide
GSAPTTGRAGEAANLTPAALTESATSGSETPGT

SEQ ID NO: 8597 - protein, 33 aa, synthetic construct
  REGION 1..33: note = Description of Artificial Sequence: Synthetic polypeptide
GSAPTTGRAGEAANLTPAPLTESATSGSETPGT

SEQ ID NO: 8598 - protein, 33 aa, synthetic construct
  REGION 1..33: note = Description of Artificial Sequence: Synthetic polypeptide
GSAPTTGRAGEAANLTPEPLTESATSGSETPGT

SEQ ID NO: 8599 - protein, 33 aa, synthetic construct
  REGION 1..33: note = Description of Artificial Sequence: Synthetic polypeptide
GSAPTTGRAGEAANLTPAGLTGAATSGSETPGT

SEQ ID NO: 8600 - protein, 33 aa, synthetic construct
  REGION 1..33: note = Description of Artificial Sequence: Synthetic polypeptide
GSAPTTGRAGEAANLTPEGLTGAATSGSETPGT

SEQ ID NO: 8601 - protein, 33 aa, synthetic construct
  REGION 1..33: note = Description of Artificial Sequence: Synthetic polypeptide
GSAPTTGRAGEAANLTPEPLTGAATSGSETPGT

SEQ ID NO: 8602 - protein, 33 aa, synthetic construct
  REGION 1..33: note = Description of Artificial Sequence: Synthetic polypeptide
GSAPTTGRAGEAANLTPAGLTEAATSGSETPGT

SEQ ID NO: 8603 - protein, 33 aa, synthetic construct
  REGION 1..33: note = Description of Artificial Sequence: Synthetic polypeptide
GSAPTTGRAGEAANLTPEGLTEAATSGSETPGT

SEQ ID NO: 8604 - protein, 33 aa, synthetic construct
  REGION 1..33: note = Description of Artificial Sequence: Synthetic polypeptide
GSAPTTGRAGEAANLTPAPLTEAATSGSETPGT

SEQ ID NO: 8605 - protein, 33 aa, synthetic construct
  REGION 1..33: note = Description of Artificial Sequence: Synthetic polypeptide
GSAPTTGRAGEAANLTPEPLTEAATSGSETPGT

SEQ ID NO: 8606 - protein, 33 aa, synthetic construct
  REGION 1..33: note = Description of Artificial Sequence: Synthetic polypeptide
GSAPTTGRAGEAANLTPEPLTGPATSGSETPGT

SEQ ID NO: 8607 - protein, 33 aa, synthetic construct
  REGION 1..33: note = Description of Artificial Sequence: Synthetic polypeptide
GSAPTTGRAGEAANLTPAGLTGGATSGSETPGT

SEQ ID NO: 8608 - protein, 33 aa, synthetic construct
  REGION 1..33: note = Description of Artificial Sequence: Synthetic polypeptide
GSAPTTGRAGEAANLTPEGLTGGATSGSETPGT

SEQ ID NO: 8609 - protein, 33 aa, synthetic construct
  REGION 1..33: note = Description of Artificial Sequence: Synthetic polypeptide
GSAPTTGRAGEAANLTPEALTGGATSGSETPGT

SEQ ID NO: 8610 - protein, 33 aa, synthetic construct
  REGION 1..33: note = Description of Artificial Sequence: Synthetic polypeptide
GSAPTTGRAGEAANLTPEPLTGGATSGSETPGT

SEQ ID NO: 8611 - protein, 33 aa, synthetic construct
  REGION 1..33: note = Description of Artificial Sequence: Synthetic polypeptide
GSAPTTGRAGEAANLTPAGLTEGATSGSETPGT

SEQ ID NO: 8612 - protein, 33 aa, synthetic construct
  REGION 1..33: note = Description of Artificial Sequence: Synthetic polypeptide
GSAPTTGRAGEAANLTPEGLTEGATSGSETPGT

SEQ ID NO: 8613 - protein, 33 aa, synthetic construct
  REGION 1..33: note = Description of Artificial Sequence: Synthetic polypeptide
GSAPTTGRAGEAANLTPAPLTEGATSGSETPGT

SEQ ID NO: 8614 - protein, 33 aa, synthetic construct
  REGION 1..33: note = Description of Artificial Sequence: Synthetic polypeptide
GSAPTTGRAGEAANLTPEPLTEGATSGSETPGT

SEQ ID NO: 8615 - protein, 30 aa, synthetic construct
  REGION 1..30: note = Description of Artificial Sequence: Synthetic polypeptide
GSAPEAGRSAEATSAGATGPATSGSETPGT

SEQ ID NO: 8616 - protein, 30 aa, synthetic construct
  REGION 1..30: note = Description of Artificial Sequence: Synthetic polypeptide
GSAPSASGTYSRGESGPGSPATSGSETPGT

SEQ ID NO: 8617 - protein, 30 aa, synthetic construct
  REGION 1..30: note = Description of Artificial Sequence: Synthetic polypeptide
GSAPSASGEAGRTDTHPGSPATSGSETPGT

SEQ ID NO: 8618 - protein, 30 aa, synthetic construct
  REGION 1..30: note = Description of Artificial Sequence: Synthetic polypeptide
GSAPSASGEPGRAAEHPGSPATSGSETPGT

SEQ ID NO: 8619 - protein, 30 aa, synthetic construct
  REGION 1..30: note = Description of Artificial Sequence: Synthetic polypeptide
GSAPSPAGESSRGTTIAGSPATSGSETPGT

SEQ ID NO: 8620 - protein, 30 aa, synthetic construct
  REGION 1..30: note = Description of Artificial Sequence: Synthetic polypeptide
GSAPEAGESAGATPAGLTGPATSGSETPGT

SEQ ID NO: 8621 - protein, 30 aa, synthetic construct
  REGION 1..30: note = Description of Artificial Sequence: Synthetic polypeptide
GSAPSASGAPLELEAGPGSPATSGSETPGT

SEQ ID NO: 8622 - protein, 30 aa, synthetic construct
  REGION 1..30: note = Description of Artificial Sequence: Synthetic polypeptide
GSAPSASGEPPELGAGPGSPATSGSETPGT

SEQ ID NO: 8623 - protein, 30 aa, synthetic construct
  REGION 1..30: note = Description of Artificial Sequence: Synthetic polypeptide
GSAPSASGEPSGLTEGPGSPATSGSETPGT

SEQ ID NO: 8624 - protein, 30 aa, synthetic construct
  REGION 1..30: note = Description of Artificial Sequence: Synthetic polypeptide
GSAPSASGTPAPLTEPPGSPATSGSETPGT

SEQ ID NO: 8625 - protein, 30 aa, synthetic construct
  REGION 1..30: note = Description of Artificial Sequence: Synthetic polypeptide
GSAPSASGTPAELTEPPGSPATSGSETPGT

SEQ ID NO: 8626 - protein, 30 aa, synthetic construct
  REGION 1..30: note = Description of Artificial Sequence: Synthetic polypeptide
GSAPSASGPPPGLTGPPGSPATSGSETPGT

SEQ ID NO: 8627 - protein, 30 aa, synthetic construct
  REGION 1..30: note = Description of Artificial Sequence: Synthetic polypeptide
GSAPSASGTPAPLGGEPGSPATSGSETPGT

SEQ ID NO: 8628 - protein, 30 aa, synthetic construct
  REGION 1..30: note = Description of Artificial Sequence: Synthetic polypeptide
GSAPSPAGAPEGLTGPAGSPATSGSETPGT

SEQ ID NO: 8629 - protein, 30 aa, synthetic construct
  REGION 1..30: note = Description of Artificial Sequence: Synthetic polypeptide
GSAPSPAGPPEGLETEAGSPATSGSETPGT

SEQ ID NO: 8630 - protein, 30 aa, synthetic construct
  REGION 1..30: note = Description of Artificial Sequence: Synthetic polypeptide
GSAPSPTSGQGGLTGPGSEPATSGSETPGT

SEQ ID NO: 8631 - protein, 30 aa, synthetic construct
  REGION 1..30: note = Description of Artificial Sequence: Synthetic polypeptide
GSAPSESAPPEGLETESTEPATSGSETPGT

SEQ ID NO: 8632 - protein, 30 aa, synthetic construct
  REGION 1..30: note = Description of Artificial Sequence: Synthetic polypeptide
GSAPSEGSEPLELGAASETPATSGSETPGT

SEQ ID NO: 8633 - protein, 30 aa, synthetic construct
  REGION 1..30: note = Description of Artificial Sequence: Synthetic polypeptide
GSAPSEGSGPAGLEAPSETPATSGSETPGT

SEQ ID NO: 8634 - protein, 30 aa, synthetic construct
  REGION 1..30: note = Description of Artificial Sequence: Synthetic polypeptide
GSAPSEPTPPASLEAEPGSPATSGSETPGT

SEQ ID NO: 8635 - protein, 29 aa, synthetic construct
  REGION 1..29: note = Description of Artificial Sequence: Synthetic peptide
GTAEAASASGGSAGGYAELRMGGAIPGSP

SEQ ID NO: 8636 - protein, 29 aa, synthetic construct
  REGION 1..29: note = Description of Artificial Sequence: Synthetic peptide
GTAEAASASGGTGGGYAPLRMGGGAPGSP

SEQ ID NO: 8637 - protein, 29 aa, synthetic construct
  REGION 1..29: note = Description of Artificial Sequence: Synthetic peptide
GTAEAASASGGAEGGYAALRMGGEIPGSP

SEQ ID NO: 8638 - protein, 29 aa, synthetic construct
  REGION 1..29: note = Description of Artificial Sequence: Synthetic peptide
GTAEAASASGGGPGGYALLRMGGPAPGSP

SEQ ID NO: 8639 - protein, 29 aa, synthetic construct
  REGION 1..29: note = Description of Artificial Sequence: Synthetic peptide
GTAEAASASGGEAGGYAFLRMGGSIPGSP

SEQ ID NO: 8640 - protein, 29 aa, synthetic construct
  REGION 1..29: note = Description of Artificial Sequence: Synthetic peptide
GTAEAASASGGPGGGYASLRMGGTAPGSP

SEQ ID NO: 8641 - protein, 29 aa, synthetic construct
  REGION 1..29: note = Description of Artificial Sequence: Synthetic peptide
GTAEAASASGGSEGGYATLRMGGAIPGSP

SEQ ID NO: 8642 - protein, 29 aa, synthetic construct
  REGION 1..29: note = Description of Artificial Sequence: Synthetic peptide
GTAEAASASGGTPGGYANLRMGGGAPGSP

SEQ ID NO: 8643 - protein, 29 aa, synthetic construct
  REGION 1..29: note = Description of Artificial Sequence: Synthetic peptide
GTAEAASASGGASGGYAHLRMGGEIPGSP

SEQ ID NO: 8644 - protein, 29 aa, synthetic construct
  REGION 1..29: note = Description of Artificial Sequence: Synthetic peptide
GTAEAASASGGGTGGYGELRMGGPAPGSP

SEQ ID NO: 8645 - protein, 29 aa, synthetic construct
  REGION 1..29: note = Description of Artificial Sequence: Synthetic peptide
GTAEAASASGGEAGGYPELRMGGSIPGSP

SEQ ID NO: 8646 - protein, 29 aa, synthetic construct
  REGION 1..29: note = Description of Artificial Sequence: Synthetic peptide
GTAEAASASGGPGGGYVELRMGGTAPGSP

SEQ ID NO: 8647 - protein, 29 aa, synthetic construct
  REGION 1..29: note = Description of Artificial Sequence: Synthetic peptide
GTAEAASASGGSEGGYLELRMGGAIPGSP

SEQ ID NO: 8648 - protein, 29 aa, synthetic construct
  REGION 1..29: note = Description of Artificial Sequence: Synthetic peptide
GTAEAASASGGTPGGYSELRMGGGAPGSP

SEQ ID NO: 8649 - protein, 29 aa, synthetic construct
  REGION 1..29: note = Description of Artificial Sequence: Synthetic peptide
GTAEAASASGGASGGYTELRMGGEIPGSP

SEQ ID NO: 8650 - protein, 29 aa, synthetic construct
  REGION 1..29: note = Description of Artificial Sequence: Synthetic peptide
GTAEAASASGGGTGGYQELRMGGPAPGSP

SEQ ID NO: 8651 - protein, 29 aa, synthetic construct
  REGION 1..29: note = Description of Artificial Sequence: Synthetic peptide
GTAEAASASGGEAGGYEELRMGGSIPGSP

SEQ ID NO: 8652 - protein, 29 aa, synthetic construct
  REGION 1..29: note = Description of Artificial Sequence: Synthetic peptide
GTAEAASASGGPGIGPAELRMGGTAPGSP

SEQ ID NO: 8653 - protein, 29 aa, synthetic construct
  REGION 1..29: note = Description of Artificial Sequence: Synthetic peptide
GTAEAASASGGSEIGAAELRMGGAIPGSP

SEQ ID NO: 8654 - protein, 29 aa, synthetic construct
  REGION 1..29: note = Description of Artificial Sequence: Synthetic peptide
GTAEAASASGGTPIGSAELRMGGGAPGSP

SEQ ID NO: 8655 - protein, 29 aa, synthetic construct
  REGION 1..29: note = Description of Artificial Sequence: Synthetic peptide
GTAEAASASGGASIGTAELRMGGEIPGSP

SEQ ID NO: 8656 - protein, 29 aa, synthetic construct
  REGION 1..29: note = Description of Artificial Sequence: Synthetic peptide
GTAEAASASGGGTIGNAELRMGGPAPGSP

SEQ ID NO: 8657 - protein, 29 aa, synthetic construct
  REGION 1..29: note = Description of Artificial Sequence: Synthetic peptide
GTAEAASASGGEAIGQAELRMGGSIPGSP

SEQ ID NO: 8658 - protein, 29 aa, synthetic construct
  REGION 1..29: note = Description of Artificial Sequence: Synthetic peptide
GTAEAASASGGPGGPYAELRMGGTAPGSP

SEQ ID NO: 8659 - protein, 29 aa, synthetic construct
  REGION 1..29: note = Description of Artificial Sequence: Synthetic peptide
GTAEAASASGGSEGAYAELRMGGAIPGSP

SEQ ID NO: 8660 - protein, 29 aa, synthetic construct
  REGION 1..29: note = Description of Artificial Sequence: Synthetic peptide
GTAEAASASGGTPGVYAELRMGGGAPGSP

SEQ ID NO: 8661 - protein, 29 aa, synthetic construct
  REGION 1..29: note = Description of Artificial Sequence: Synthetic peptide
GTAEAASASGGASGLYAELRMGGEIPGSP

SEQ ID NO: 8662 - protein, 29 aa, synthetic construct
  REGION 1..29: note = Description of Artificial Sequence: Synthetic peptide
GTAEAASASGGGTGIYAELRMGGPAPGSP

SEQ ID NO: 8663 - protein, 29 aa, synthetic construct
  REGION 1..29: note = Description of Artificial Sequence: Synthetic peptide
GTAEAASASGGEAGFYAELRMGGSIPGSP

SEQ ID NO: 8664 - protein, 29 aa, synthetic construct
  REGION 1..29: note = Description of Artificial Sequence: Synthetic peptide
GTAEAASASGGPGGYYAELRMGGTAPGSP

SEQ ID NO: 8665 - protein, 29 aa, synthetic construct
  REGION 1..29: note = Description of Artificial Sequence: Synthetic peptide
GTAEAASASGGSEGSYAELRMGGAIPGSP

SEQ ID NO: 8666 - protein, 29 aa, synthetic construct
  REGION 1..29: note = Description of Artificial Sequence: Synthetic peptide
GTAEAASASGGTPGNYAELRMGGGAPGSP

SEQ ID NO: 8667 - protein, 29 aa, synthetic construct
  REGION 1..29: note = Description of Artificial Sequence: Synthetic peptide
GTAEAASASGGASGEYAELRMGGEIPGSP

SEQ ID NO: 8668 - protein, 29 aa, synthetic construct
  REGION 1..29: note = Description of Artificial Sequence: Synthetic peptide
GTAEAASASGGGTGHYAELRMGGPAPGSP

SEQ ID NO: 8669 - protein, 29 aa, synthetic construct
  REGION 1..29: note = Description of Artificial Sequence: Synthetic peptide
GTAEAASASGGEAGGYAEARMGGSIPGSP

SEQ ID NO: 8670 - protein, 29 aa, synthetic construct
  REGION 1..29: note = Description of Artificial Sequence: Synthetic peptide
GTAEAASASGGPGGGYAEVRMGGTAPGSP

SEQ ID NO: 8671 - protein, 29 aa, synthetic construct
  REGION 1..29: note = Description of Artificial Sequence: Synthetic peptide
GTAEAASASGGSEGGYAEIRMGGAIPGSP

SEQ ID NO: 8672 - protein, 29 aa, synthetic construct
  REGION 1..29: note = Description of Artificial Sequence: Synthetic peptide
GTAEAASASGGTPGGYAEFRMGGGAPGSP

SEQ ID NO: 8673 - protein, 29 aa, synthetic construct
  REGION 1..29: note = Description of Artificial Sequence: Synthetic peptide
GTAEAASASGGASGGYAEYRMGGEIPGSP

SEQ ID NO: 8674 - protein, 29 aa, synthetic construct
  REGION 1..29: note = Description of Artificial Sequence: Synthetic peptide
GTAEAASASGGGTGGYAESRMGGPAPGSP

SEQ ID NO: 8675 - protein, 29 aa, synthetic construct
  REGION 1..29: note = Description of Artificial Sequence: Synthetic peptide
GTAEAASASGGEAGGYAETRMGGSIPGSP

SEQ ID NO: 8676 - protein, 29 aa, synthetic construct
  REGION 1..29: note = Description of Artificial Sequence: Synthetic peptide
GTAEAASASGGPGGGYAELAMGGTRPGSP

SEQ ID NO: 8677 - protein, 29 aa, synthetic construct
  REGION 1..29: note = Description of Artificial Sequence: Synthetic peptide
GTAEAASASGGSEGGYAELVMGGARPGSP

SEQ ID NO: 8678 - protein, 29 aa, synthetic construct
  REGION 1..29: note = Description of Artificial Sequence: Synthetic peptide
GTAEAASASGGTPGGYAELLMGGGRPGSP

SEQ ID NO: 8679 - protein, 29 aa, synthetic construct
  REGION 1..29: note = Description of Artificial Sequence: Synthetic peptide
GTAEAASASGGASGGYAELIMGGERPGSP

SEQ ID NO: 8680 - protein, 29 aa, synthetic construct
  REGION 1..29: note = Description of Artificial Sequence: Synthetic peptide
GTAEAASASGGGTGGYAELWMGGPRPGSP

SEQ ID NO: 8681 - protein, 29 aa, synthetic construct
  REGION 1..29: note = Description of Artificial Sequence: Synthetic peptide
GTAEAASASGGEAGGYAELSMGGSRPGSP

SEQ ID NO: 8682 - protein, 29 aa, synthetic construct
  REGION 1..29: note = Description of Artificial Sequence: Synthetic peptide
GTAEAASASGGPGGGYAELTMGGTRPGSP

SEQ ID NO: 8683 - protein, 29 aa, synthetic construct
  REGION 1..29: note = Description of Artificial Sequence: Synthetic peptide
GTAEAASASGGSEGGYAELQMGGARPGSP

SEQ ID NO: 8684 - protein, 29 aa, synthetic construct
  REGION 1..29: note = Description of Artificial Sequence: Synthetic peptide
GTAEAASASGGTPGGYAELNMGGGRPGSP

SEQ ID NO: 8685 - protein, 29 aa, synthetic construct
  REGION 1..29: note = Description of Artificial Sequence: Synthetic peptide
GTAEAASASGGASGGYAELEMGGERPGSP

SEQ ID NO: 8686 - protein, 29 aa, synthetic construct
  REGION 1..29: note = Description of Artificial Sequence: Synthetic peptide
GTAEAASASGGGTGGYAELRPGGPIPGSP

SEQ ID NO: 8687 - protein, 29 aa, synthetic construct
  REGION 1..29: note = Description of Artificial Sequence: Synthetic peptide
GTAEAASASGGEAGGYAELRAGGSAPGSP

SEQ ID NO: 8688 - protein, 29 aa, synthetic construct
  REGION 1..29: note = Description of Artificial Sequence: Synthetic peptide
GTAEAASASGGPGGGYAELRLGGTIPGSP

SEQ ID NO: 8689 - protein, 29 aa, synthetic construct
  REGION 1..29: note = Description of Artificial Sequence: Synthetic peptide
GTAEAASASGGSEGGYAELRIGGAAPGSP

SEQ ID NO: 8690 - protein, 29 aa, synthetic construct
  REGION 1..29: note = Description of Artificial Sequence: Synthetic peptide
GTAEAASASGGTPGGYAELRSGGGIPGSP

SEQ ID NO: 8691 - protein, 29 aa, synthetic construct
  REGION 1..29: note = Description of Artificial Sequence: Synthetic peptide
GTAEAASASGGASGGYAELRNGGEAPGSP

SEQ ID NO: 8692 - protein, 29 aa, synthetic construct
  REGION 1..29: note = Description of Artificial Sequence: Synthetic peptide
GTAEAASASGGGTGGYAELRQGGPIPGSP

SEQ ID NO: 8693 - protein, 29 aa, synthetic construct
  REGION 1..29: note = Description of Artificial Sequence: Synthetic peptide
GTAEAASASGGEAGGYAELRDGGSAPGSP

SEQ ID NO: 8694 - protein, 29 aa, synthetic construct
  REGION 1..29: note = Description of Artificial Sequence: Synthetic peptide
GTAEAASASGGPGGGYAELREGGTIPGSP

SEQ ID NO: 8695 - protein, 29 aa, synthetic construct
  REGION 1..29: note = Description of Artificial Sequence: Synthetic peptide
GTAEAASASGGSEGGYAELRHGGAAPGSP

SEQ ID NO: 8696 - protein, 29 aa, synthetic construct
  REGION 1..29: note = Description of Artificial Sequence: Synthetic peptide
GTAEAASASGGTPGGYAELRMPGGIPGSP

SEQ ID NO: 8697 - protein, 29 aa, synthetic construct
  REGION 1..29: note = Description of Artificial Sequence: Synthetic peptide
GTAEAASASGGASGGYAELRMAGEAPGSP

SEQ ID NO: 8698 - protein, 29 aa, synthetic construct
  REGION 1..29: note = Description of Artificial Sequence: Synthetic peptide
GTAEAASASGGGTGGYAELRMVGPIPGSP

SEQ ID NO: 8699 - protein, 29 aa, synthetic construct
  REGION 1..29: note = Description of Artificial Sequence: Synthetic peptide
GTAEAASASGGEAGGYAELRMLGSAPGSP

SEQ ID NO: 8700 - protein, 29 aa, synthetic construct
  REGION 1..29: note = Description of Artificial Sequence: Synthetic peptide
GTAEAASASGGPGGGYAELRMIGTIPGSP

SEQ ID NO: 8701 - protein, 29 aa, synthetic construct
  REGION 1..29: note = Description of Artificial Sequence: Synthetic peptide
GTAEAASASGGSEGGYAELRMYGAIPGSP

SEQ ID NO: 8702 - protein, 29 aa, synthetic construct
  REGION 1..29: note = Description of Artificial Sequence: Synthetic peptide
GTAEAASASGGTPGGYAELRMSGGAPGSP

SEQ ID NO: 8703 - protein, 29 aa, synthetic construct
  REGION 1..29: note = Description of Artificial Sequence: Synthetic peptide
GTAEAASASGGASGGYAELRMNGEIPGSP

SEQ ID NO: 8704 - protein, 29 aa, synthetic construct
  REGION 1..29: note = Description of Artificial Sequence: Synthetic peptide
GTAEAASASGGGTGGYAELRMQGPAPGSP

SEQ ID NO: 8705 - protein, 29 aa, synthetic construct
  REGION 1..29: note = Description of Artificial Sequence: Synthetic peptide
GTAEAASASGGANHTPAGLTGPGARPGSP

SEQ ID NO: 8706 - protein, 29 aa, synthetic construct
  REGION 1..29: note = Description of Artificial Sequence: Synthetic peptide
GTAEAASASGGANTAPEGLTGPSTRPGSP

SEQ ID NO: 8707 - protein, 29 aa, synthetic construct
  REGION 1..29: note = Description of Artificial Sequence: Synthetic peptide
GTAEAASASGGTGAPPGGLTGPGTRPGSP

SEQ ID NO: 8708 - protein, 29 aa, synthetic construct
  REGION 1..29: note = Description of Artificial Sequence: Synthetic peptide
GTAEAASASGGANHEPSGLTEGSPRPGSP

SEQ ID NO: 8709 - protein, 29 aa, synthetic construct
  REGION 1..29: note = Description of Artificial Sequence: Synthetic peptide
GTAEAASASGGANTEPPELGAGTERPGSP

SEQ ID NO: 8710 - protein, 29 aa, synthetic construct
  REGION 1..29: note = Description of Artificial Sequence: Synthetic peptide
GTAEAASASGGASGPPPGLTGPPGRPGSP

SEQ ID NO: 8711 - protein, 29 aa, synthetic construct
  REGION 1..29: note = Description of Artificial Sequence: Synthetic peptide
GTAEAASASGGASGTPAPLGGEPGRPGSP

SEQ ID NO: 8712 - protein, 29 aa, synthetic construct
  REGION 1..29: note = Description of Artificial Sequence: Synthetic peptide
GTAEAASASGGPAGPPEGLETEAGRPGSP

SEQ ID NO: 8713 - protein, 29 aa, synthetic construct
  REGION 1..29: note = Description of Artificial Sequence: Synthetic peptide
GTAEAASASGGPTSGQGGLTGPESRPGSP

SEQ ID NO: 8714 - protein, 29 aa, synthetic construct
  REGION 1..29: note = Description of Artificial Sequence: Synthetic peptide
GTAEAASASGGSAGGAANLVRGGAIPGSP

SEQ ID NO: 8715 - protein, 29 aa, synthetic construct
  REGION 1..29: note = Description of Artificial Sequence: Synthetic peptide
GTAEAASASGGTGGGAAPLVRGGGAPGSP

SEQ ID NO: 8716 - protein, 29 aa, synthetic construct
  REGION 1..29: note = Description of Artificial Sequence: Synthetic peptide
GTAEAASASGGAEGGAAALVRGGEIPGSP

SEQ ID NO: 8717 - protein, 29 aa, synthetic construct
  REGION 1..29: note = Description of Artificial Sequence: Synthetic peptide
GTAEAASASGGGPGGAALLVRGGPAPGSP

SEQ ID NO: 8718 - protein, 29 aa, synthetic construct
  REGION 1..29: note = Description of Artificial Sequence: Synthetic peptide
GTAEAASASGGEAGGAAFLVRGGSIPGSP

SEQ ID NO: 8719 - protein, 29 aa, synthetic construct
  REGION 1..29: note = Description of Artificial Sequence: Synthetic peptide
GTAEAASASGGPGGGAASLVRGGTAPGSP

SEQ ID NO: 8720 - protein, 29 aa, synthetic construct
  REGION 1..29: note = Description of Artificial Sequence: Synthetic peptide
GTAEAASASGGSEGGAATLVRGGAIPGSP

SEQ ID NO: 8721 - protein, 29 aa, synthetic construct
  REGION 1..29: note = Description of Artificial Sequence: Synthetic peptide
GTAEAASASGGTPGGAAGLVRGGGAPGSP

SEQ ID NO: 8722 - protein, 29 aa, synthetic construct
  REGION 1..29: note = Description of Artificial Sequence: Synthetic peptide
GTAEAASASGGASGGAADLVRGGEIPGSP

SEQ ID NO: 8723 - protein, 29 aa, synthetic construct
  REGION 1..29: note = Description of Artificial Sequence: Synthetic peptide
GTAEAASASGGGTGGAGNLVRGGPAPGSP

SEQ ID NO: 8724 - protein, 29 aa, synthetic construct
  REGION 1..29: note = Description of Artificial Sequence: Synthetic peptide
GTAEAASASGGEAGGAPNLVRGGSIPGSP

SEQ ID NO: 8725 - protein, 29 aa, synthetic construct
  REGION 1..29: note = Description of Artificial Sequence: Synthetic peptide
GTAEAASASGGPGGGAVNLVRGGTAPGSP

SEQ ID NO: 8726 - protein, 29 aa, synthetic construct
  REGION 1..29: note = Description of Artificial Sequence: Synthetic peptide
GTAEAASASGGSEGGALNLVRGGAIPGSP

SEQ ID NO: 8727 - protein, 29 aa, synthetic construct
  REGION 1..29: note = Description of Artificial Sequence: Synthetic peptide
GTAEAASASGGTPGGASNLVRGGGAPGSP

SEQ ID NO: 8728 - protein, 29 aa, synthetic construct
  REGION 1..29: note = Description of Artificial Sequence: Synthetic peptide
GTAEAASASGGASGGATNLVRGGEIPGSP

SEQ ID NO: 8729 - protein, 29 aa, synthetic construct
  REGION 1..29: note = Description of Artificial Sequence: Synthetic peptide
GTAEAASASGGGTGGAQNLVRGGPAPGSP

SEQ ID NO: 8730 - protein, 29 aa, synthetic construct
  REGION 1..29: note = Description of Artificial Sequence: Synthetic peptide
GTAEAASASGGEAGGAENLVRGGSIPGSP

SEQ ID NO: 8731 - protein, 30 aa, synthetic construct
  REGION 1..30: note = Description of Artificial Sequence: Synthetic polypeptide
GTAEAASASGEAGRSANHEPLGLVATPGSP

SEQ ID NO: 8732 - protein, 30 aa, synthetic construct
  REGION 1..30: note = Description of Artificial Sequence: Synthetic polypeptide
GTAEAASASGASGRSTNAGPSGLAGPPGSP

SEQ ID NO: 8733 - protein, 30 aa, synthetic construct
  REGION 1..30: note = Description of Artificial Sequence: Synthetic polypeptide
GTAEAASASGASGRSTNAGPQGLAGQPGSP

SEQ ID NO: 8734 - protein, 30 aa, synthetic construct
  REGION 1..30: note = Description of Artificial Sequence: Synthetic polypeptide
GTAEAASASGASGRSTNAGPPGLTGPPGSP

SEQ ID NO: 8735 - protein, 30 aa, synthetic construct
  REGION 1..30: note = Description of Artificial Sequence: Synthetic polypeptide
GTAEAASASGASSRGTNAGPAGLTGPPGSP

SEQ ID NO: 8736 - protein, 30 aa, synthetic construct
  REGION 1..30: note = Description of Artificial Sequence: Synthetic polypeptide
GTAEAASASGASSRTTNTGPSTLTGPPGSP

SEQ ID NO: 8737 - protein, 30 aa, synthetic construct
  REGION 1..30: note = Description of Artificial Sequence: Synthetic polypeptide
GTAEAASASGAAGRSDNGTPLELVAPPGSP

SEQ ID NO: 8738 - protein, 30 aa, synthetic construct
  REGION 1..30: note = Description of Artificial Sequence: Synthetic polypeptide
GTAEAASASGASGRGTNAGPAGLTGPPGSP

SEQ ID NO: 8739 - protein, 30 aa, synthetic construct
  REGION 1..30: note = Description of Artificial Sequence: Synthetic polypeptide
GTAEAASASGLFGRNDNHEPLELGGGPGSP

SEQ ID NO: 8740 - protein, 30 aa, synthetic construct
  REGION 1..30: note = Description of Artificial Sequence: Synthetic polypeptide
GTAEAASASGTAGRSDNLEPLGLVFGPGSP

SEQ ID NO: 8741 - protein, 30 aa, synthetic construct
  REGION 1..30: note = Description of Artificial Sequence: Synthetic polypeptide
GTAEAASASGLDGRSDNFHPPELVAGPGSP

SEQ ID NO: 8742 - protein, 30 aa, synthetic construct
  REGION 1..30: note = Description of Artificial Sequence: Synthetic polypeptide
GTAEAASASGLEGRSDNEEPENLVAGPGSP

SEQ ID NO: 8743 - protein, 30 aa, synthetic construct
  REGION 1..30: note = Description of Artificial Sequence: Synthetic polypeptide
GTAEAASASGLKGRSDNNAPLALVAGPGSP

SEQ ID NO: 8744 - protein, 30 aa, synthetic construct
  REGION 1..30: note = Description of Artificial Sequence: Synthetic polypeptide
GTAEAASASGVYSRGTNAGPHGLTGRPGSP

SEQ ID NO: 8745 - protein, 30 aa, synthetic construct
  REGION 1..30: note = Description of Artificial Sequence: Synthetic polypeptide
GTAEAASASGANSRGTNKGFAGLIGPPGSP

SEQ ID NO: 8746 - protein, 30 aa, synthetic construct
  REGION 1..30: note = Description of Artificial Sequence: Synthetic polypeptide
GTAEAASASGASSRLTNEAPAGLTIPPGSP

SEQ ID NO: 8747 - protein, 30 aa, synthetic construct
  REGION 1..30: note = Description of Artificial Sequence: Synthetic polypeptide
GTAEAASASGDQSRGTNAGPEGLTDPPGSP

SEQ ID NO: 8748 - protein, 30 aa, synthetic construct
  REGION 1..30: note = Description of Artificial Sequence: Synthetic polypeptide
GTAEAASASGESSRGTNIGQGGLTGPPGSP

SEQ ID NO: 8749 - protein, 30 aa, synthetic construct
  REGION 1..30: note = Description of Artificial Sequence: Synthetic polypeptide
GTAEAASASGSSSRGTNQDPAGLTIPPGSP

SEQ ID NO: 8750 - protein, 30 aa, synthetic construct
  REGION 1..30: note = Description of Artificial Sequence: Synthetic polypeptide
GTAEAASASGASSRGQNHSPMGLTGPPGSP

SEQ ID NO: 8751 - protein, 30 aa, synthetic construct
  REGION 1..30: note = Description of Artificial Sequence: Synthetic polypeptide
GTAEAASASGAYSRGPNAGPAGLEGRPGSP

SEQ ID NO: 8752 - protein, 30 aa, synthetic construct
  REGION 1..30: note = Description of Artificial Sequence: Synthetic polypeptide
GTAEAASASGASERGNNAGPANLTGFPGSP

SEQ ID NO: 8753 - protein, 30 aa, synthetic construct
  REGION 1..30: note = Description of Artificial Sequence: Synthetic polypeptide
GTAEAASASGASHRGTNPKPAILTGPPGSP

SEQ ID NO: 8754 - protein, 30 aa, synthetic construct
  REGION 1..30: note = Description of Artificial Sequence: Synthetic polypeptide
GTAEAASASGMSSRRTNANPAQLTGPPGSP

SEQ ID NO: 8755 - protein, 30 aa, synthetic construct
  REGION 1..30: note = Description of Artificial Sequence: Synthetic polypeptide
GTAEAASASGGAGRTDNHEPLELGAAPGSP

SEQ ID NO: 8756 - protein, 30 aa, synthetic construct
  REGION 1..30: note = Description of Artificial Sequence: Synthetic polypeptide
GTAEAASASGLAGRSENTAPLELTAGPGSP

SEQ ID NO: 8757 - protein, 30 aa, synthetic construct
  REGION 1..30: note = Description of Artificial Sequence: Synthetic polypeptide
GTAEAASASGLEGRPDNHEPLALVASPGSP

SEQ ID NO: 8758 - protein, 30 aa, synthetic construct
  REGION 1..30: note = Description of Artificial Sequence: Synthetic polypeptide
GTAEAASASGLSGRSDNEEPLALPAGPGSP

SEQ ID NO: 8759 - protein, 30 aa, synthetic construct
  REGION 1..30: note = Description of Artificial Sequence: Synthetic polypeptide
GTAEAASASGEAGRTDNHEPLELSAPPGSP

SEQ ID NO: 8760 - protein, 30 aa, synthetic construct
  REGION 1..30: note = Description of Artificial Sequence: Synthetic polypeptide
GTAEAASASGEGGRSDNHGPLELVSGPGSP

SEQ ID NO: 8761 - protein, 30 aa, synthetic construct
  REGION 1..30: note = Description of Artificial Sequence: Synthetic polypeptide
GTAEAASASGLSGRSDNEAPLELEAGPGSP

SEQ ID NO: 8762 - protein, 30 aa, synthetic construct
  REGION 1..30: note = Description of Artificial Sequence: Synthetic polypeptide
GTAEAASASGLGGRADNHEPPELGAGPGSP

SEQ ID NO: 8763 - protein, 30 aa, synthetic construct
  REGION 1..30: note = Description of Artificial Sequence: Synthetic polypeptide
GTAEAASASGPPSRGTNAEPAGLTGEPGSP

SEQ ID NO: 8764 - protein, 30 aa, synthetic construct
  REGION 1..30: note = Description of Artificial Sequence: Synthetic polypeptide
GTAEAASASGASTRGENAGPAGLEAPPGSP

SEQ ID NO: 8765 - protein, 30 aa, synthetic construct
  REGION 1..30: note = Description of Artificial Sequence: Synthetic polypeptide
GTAEAASASGESSRGTNGAPEGLTGPPGSP

SEQ ID NO: 8766 - protein, 30 aa, synthetic construct
  REGION 1..30: note = Description of Artificial Sequence: Synthetic polypeptide
GTAEAASASGASSRATNESPAGLTGEPGSP

SEQ ID NO: 8767 - protein, 30 aa, synthetic construct
  REGION 1..30: note = Description of Artificial Sequence: Synthetic polypeptide
GTAEAASASGASSRGENPPPGGLTGPPGSP

SEQ ID NO: 8768 - protein, 30 aa, synthetic construct
  REGION 1..30: note = Description of Artificial Sequence: Synthetic polypeptide
GTAEAASASGAASRGTNTGPAELTGSPGSP

SEQ ID NO: 8769 - protein, 30 aa, synthetic construct
  REGION 1..30: note = Description of Artificial Sequence: Synthetic polypeptide
GTAEAASASGAGSRTTNAGPGGLEGPPGSP

SEQ ID NO: 8770 - protein, 30 aa, synthetic construct
  REGION 1..30: note = Description of Artificial Sequence: Synthetic polypeptide
GTAEAASASGAPSRGENAGPATLTGAPGSP

SEQ ID NO: 8771 - protein, 30 aa, synthetic construct
  REGION 1..30: note = Description of Artificial Sequence: Synthetic polypeptide
GTAEAASASGESGRAANTGPPTLTAPPGSP

SEQ ID NO: 8772 - protein, 30 aa, synthetic construct
  REGION 1..30: note = Description of Artificial Sequence: Synthetic polypeptide
GTAEAASASGNPGRAANEGPPGLPGSPGSP

SEQ ID NO: 8773 - protein, 30 aa, synthetic construct
  REGION 1..30: note = Description of Artificial Sequence: Synthetic polypeptide
GTAEAASASGESSRAANLTPPELTGPPGSP

SEQ ID NO: 8774 - protein, 30 aa, synthetic construct
  REGION 1..30: note = Description of Artificial Sequence: Synthetic polypeptide
GTAEAASASGASGRAANETPPGLTGAPGSP

SEQ ID NO: 8775 - protein, 30 aa, synthetic construct
  REGION 1..30: note = Description of Artificial Sequence: Synthetic polypeptide
GTAEAASASGNSGRGENLGAPGLTGTPGSP

SEQ ID NO: 8776 - protein, 30 aa, synthetic construct
  REGION 1..30: note = Description of Artificial Sequence: Synthetic polypeptide
GTAEAASASGTTGRAANLTPAGLTGPPGSP

SEQ ID NO: 8777 - protein, 30 aa, synthetic construct
  REGION 1..30: note = Description of Artificial Sequence: Synthetic polypeptide
GTAEAASASGEAGRSANHTPAGLTGPPGSP

SEQ ID NO: 8778 - protein, 30 aa, synthetic construct
  REGION 1..30: note = Description of Artificial Sequence: Synthetic polypeptide
GTAEAASASGESGRAANTTPAGLTGPPGSP

SEQ ID NO: 8779 - protein, 33 aa, synthetic construct
  REGION 1..33: note = Description of Artificial Sequence: Synthetic polypeptide
GTAEAASASGTTGRATEAANLTPAGLTGPPGSP

SEQ ID NO: 8780 - protein, 33 aa, synthetic construct
  REGION 1..33: note = Description of Artificial Sequence: Synthetic polypeptide
GTAEAASASGTTGRAEEAANLTPAGLTGPPGSP

SEQ ID NO: 8781 - protein, 33 aa, synthetic construct
  REGION 1..33: note = Description of Artificial Sequence: Synthetic polypeptide
GTAEAASASGTTGRAGEAANLTPAGLTGPPGSP

SEQ ID NO: 8782 - protein, 33 aa, synthetic construct
  REGION 1..33: note = Description of Artificial Sequence: Synthetic polypeptide
GTAEAASASGTTGRATEAANATPAGLTGPPGSP

SEQ ID NO: 8783 - protein, 33 aa, synthetic construct
  REGION 1..33: note = Description of Artificial Sequence: Synthetic polypeptide
GTAEAASASGTTGRAGEAEGATSAGATGPPGSP

SEQ ID NO: 8784 - protein, 33 aa, synthetic construct
  REGION 1..33: note = Description of Artificial Sequence: Synthetic polypeptide
GTAEAASASGTTGEAGEAANATSAGATGPPGSP

SEQ ID NO: 8785 - protein, 33 aa, synthetic construct
  REGION 1..33: note = Description of Artificial Sequence: Synthetic polypeptide
GTAEAASASGTTGEAGEAAGLTPAGLTGPPGSP

SEQ ID NO: 8786 - protein, 33 aa, synthetic construct
  REGION 1..33: note = Description of Artificial Sequence: Synthetic polypeptide
GTAEAASASGTTGAAGEAANATPAGLTGPPGSP

SEQ ID NO: 8787 - protein, 33 aa, synthetic construct
  REGION 1..33: note = Description of Artificial Sequence: Synthetic polypeptide
GTAEAASASGTTGRAGEAAGLTPAGLTGPPGSP

SEQ ID NO: 8788 - protein, 33 aa, synthetic construct
  REGION 1..33: note = Description of Artificial Sequence: Synthetic polypeptide
GTAEAASASGTTGRAGEAANATSAGATGPPGSP

SEQ ID NO: 8789 - protein, 33 aa, synthetic construct
  REGION 1..33: note = Description of Artificial Sequence: Synthetic polypeptide
GTAEAASASGTTGEAGEAAGATSAGATGPPGSP

SEQ ID NO: 8790 - protein, 30 aa, synthetic construct
  REGION 1..30: note = Description of Artificial Sequence: Synthetic polypeptide
GTAEAASASGESGRAANTEPPELGAGPGSP

SEQ ID NO: 8791 - protein, 30 aa, synthetic construct
  REGION 1..30: note = Description of Artificial Sequence: Synthetic polypeptide
GTAEAASASGESGRAANTAPEGLTGPPGSP

SEQ ID NO: 8792 - protein, 30 aa, synthetic construct
  REGION 1..30: note = Description of Artificial Sequence: Synthetic polypeptide
GTAEAASASGEPGRAANHEPSGLTEGPGSP

SEQ ID NO: 8793 - protein, 33 aa, synthetic construct
  REGION 1..33: note = Description of Artificial Sequence: Synthetic polypeptide
GTAEAASASGESGRAANHTGAPPGGLTGPPGSP

SEQ ID NO: 8794 - protein, 33 aa, synthetic construct
  REGION 1..33: note = Description of Artificial Sequence: Synthetic polypeptide
GTAEAASASGTTGRTGEGANATPGGLTGPPGSP

SEQ ID NO: 8795 - protein, 33 aa, synthetic construct
  REGION 1..33: note = Description of Artificial Sequence: Synthetic polypeptide
GTAEAASASGRTGRSGEAANETPEGLEGPPGSP

SEQ ID NO: 8796 - protein, 33 aa, synthetic construct
  REGION 1..33: note = Description of Artificial Sequence: Synthetic polypeptide
GTAEAASASGRTGRTGESANETPAGLGGPPGSP

SEQ ID NO: 8797 - protein, 33 aa, synthetic construct
  REGION 1..33: note = Description of Artificial Sequence: Synthetic polypeptide
GTAEAASASGSTGRTGEPANETPAGLSGPPGSP

SEQ ID NO: 8798 - protein, 33 aa, synthetic construct
  REGION 1..33: note = Description of Artificial Sequence: Synthetic polypeptide
GTAEAASASGTTGRAGEPANATPTGLSGPPGSP

SEQ ID NO: 8799 - protein, 33 aa, synthetic construct
  REGION 1..33: note = Description of Artificial Sequence: Synthetic polypeptide
GTAEAASASGRTGRPGEGANATPTGLPGPPGSP

SEQ ID NO: 8800 - protein, 33 aa, synthetic construct
  REGION 1..33: note = Description of Artificial Sequence: Synthetic polypeptide
GTAEAASASGRTGRGGEAANATPSGLGGPPGSP

SEQ ID NO: 8801 - protein, 33 aa, synthetic construct
  REGION 1..33: note = Description of Artificial Sequence: Synthetic polypeptide
GTAEAASASGSTGRSGESANATPGGLGGPPGSP

SEQ ID NO: 8802 - protein, 33 aa, synthetic construct
  REGION 1..33: note = Description of Artificial Sequence: Synthetic polypeptide
GTAEAASASGRTGRTGEEANATPAGLPGPPGSP

SEQ ID NO: 8803 - protein, 33 aa, synthetic construct
  REGION 1..33: note = Description of Artificial Sequence: Synthetic polypeptide
GTAEAASASGATGRPGEPANTTPEGLEGPPGSP

SEQ ID NO: 8804 - protein, 33 aa, synthetic construct
  REGION 1..33: note = Description of Artificial Sequence: Synthetic polypeptide
GTAEAASASGSTGRSGEPANATPGGLTGPPGSP

SEQ ID NO: 8805 - protein, 33 aa, synthetic construct
  REGION 1..33: note = Description of Artificial Sequence: Synthetic polypeptide
GTAEAASASGPTGRGGEGANTTPTGLPGPPGSP

SEQ ID NO: 8806 - protein, 33 aa, synthetic construct
  REGION 1..33: note = Description of Artificial Sequence: Synthetic polypeptide
GTAEAASASGPTGRSGEGANATPSGLTGPPGSP

SEQ ID NO: 8807 - protein, 33 aa, synthetic construct
  REGION 1..33: note = Description of Artificial Sequence: Synthetic polypeptide
GTAEAASASGTTGRASEGANSTPAPLTEPPGSP

SEQ ID NO: 8808 - protein, 33 aa, synthetic construct
  REGION 1..33: note = Description of Artificial Sequence: Synthetic polypeptide
GTAEAASASGTYGRAAEAANTTPAGLTAPPGSP

SEQ ID NO: 8809 - protein, 33 aa, synthetic construct
  REGION 1..33: note = Description of Artificial Sequence: Synthetic polypeptide
GTAEAASASGTTGRATEGANATPAELTEPPGSP

SEQ ID NO: 8810 - protein, 33 aa, synthetic construct
  REGION 1..33: note = Description of Artificial Sequence: Synthetic polypeptide
GTAEAASASGTVGRASEEANTTPASLTGPPGSP

SEQ ID NO: 8811 - protein, 33 aa, synthetic construct
  REGION 1..33: note = Description of Artificial Sequence: Synthetic polypeptide
GTAEAASASGTTGRAPEAANATPAPLTGPPGSP

SEQ ID NO: 8812 - protein, 33 aa, synthetic construct
  REGION 1..33: note = Description of Artificial Sequence: Synthetic polypeptide
GTAEAASASGTWGRATEPANATPAPLTSPPGSP

SEQ ID NO: 8813 - protein, 33 aa, synthetic construct
  REGION 1..33: note = Description of Artificial Sequence: Synthetic polypeptide
GTAEAASASGTVGRASESANATPAELTSPPGSP

SEQ ID NO: 8814 - protein, 33 aa, synthetic construct
  REGION 1..33: note = Description of Artificial Sequence: Synthetic polypeptide
GTAEAASASGTVGRAPEGANSTPAGLTGPPGSP

SEQ ID NO: 8815 - protein, 33 aa, synthetic construct
  REGION 1..33: note = Description of Artificial Sequence: Synthetic polypeptide
GTAEAASASGTWGRATEAPNLEPATLTTPPGSP

SEQ ID NO: 8816 - protein, 33 aa, synthetic construct
  REGION 1..33: note = Description of Artificial Sequence: Synthetic polypeptide
GTAEAASASGTTGRATEAPNLTPAPLTEPPGSP

SEQ ID NO: 8817 - protein, 33 aa, synthetic construct
  REGION 1..33: note = Description of Artificial Sequence: Synthetic polypeptide
GTAEAASASGTQGRATEAPNLSPAALTSPPGSP

SEQ ID NO: 8818 - protein, 33 aa, synthetic construct
  REGION 1..33: note = Description of Artificial Sequence: Synthetic polypeptide
GTAEAASASGTQGRAAEAPNLTPATLTAPPGSP

SEQ ID NO: 8819 - protein, 33 aa, synthetic construct
  REGION 1..33: note = Description of Artificial Sequence: Synthetic polypeptide
GTAEAASASGTSGRAPEATNLAPAPLTGPPGSP

SEQ ID NO: 8820 - protein, 33 aa, synthetic construct
  REGION 1..33: note = Description of Artificial Sequence: Synthetic polypeptide
GTAEAASASGTQGRAAEAANLTPAGLTEPPGSP

SEQ ID NO: 8821 - protein, 33 aa, synthetic construct
  REGION 1..33: note = Description of Artificial Sequence: Synthetic polypeptide
GTAEAASASGTTGRAGSAPNLPPTGLTTPPGSP

SEQ ID NO: 8822 - protein, 33 aa, synthetic construct
  REGION 1..33: note = Description of Artificial Sequence: Synthetic polypeptide
GTAEAASASGTTGRAGGAENLPPEGLTAPPGSP

SEQ ID NO: 8823 - protein, 33 aa, synthetic construct
  REGION 1..33: note = Description of Artificial Sequence: Synthetic polypeptide
GTAEAASASGTTSRAGTATNLTPEGLTAPPGSP

SEQ ID NO: 8824 - protein, 33 aa, synthetic construct
  REGION 1..33: note = Description of Artificial Sequence: Synthetic polypeptide
GTAEAASASGTTGRAGTATNLPPSGLTTPPGSP

SEQ ID NO: 8825 - protein, 33 aa, synthetic construct
  REGION 1..33: note = Description of Artificial Sequence: Synthetic polypeptide
GTAEAASASGTTARAGEAENLSPSGLTAPPGSP

SEQ ID NO: 8826 - protein, 33 aa, synthetic construct
  REGION 1..33: note = Description of Artificial Sequence: Synthetic polypeptide
GTAEAASASGTTGRAGGAGNLAPGGLTEPPGSP

SEQ ID NO: 8827 - protein, 33 aa, synthetic construct
  REGION 1..33: note = Description of Artificial Sequence: Synthetic polypeptide
GTAEAASASGTTGRAGTATNLPPEGLTGPPGSP

SEQ ID NO: 8828 - protein, 33 aa, synthetic construct
  REGION 1..33: note = Description of Artificial Sequence: Synthetic polypeptide
GTAEAASASGTTGRAGGAANLAPTGLTEPPGSP

SEQ ID NO: 8829 - protein, 33 aa, synthetic construct
  REGION 1..33: note = Description of Artificial Sequence: Synthetic polypeptide
GTAEAASASGTTGRAGTAENLAPSGLTTPPGSP

SEQ ID NO: 8830 - protein, 33 aa, synthetic construct
  REGION 1..33: note = Description of Artificial Sequence: Synthetic polypeptide
GTAEAASASGTTGRAGSATNLGPGGLTGPPGSP

SEQ ID NO: 8831 - protein, 33 aa, synthetic construct
  REGION 1..33: note = Description of Artificial Sequence: Synthetic polypeptide
GTAEAASASGTTARAGGAENLTPAGLTEPPGSP

SEQ ID NO: 8832 - protein, 33 aa, synthetic construct
  REGION 1..33: note = Description of Artificial Sequence: Synthetic polypeptide
GTAEAASASGTTARAGSAENLSPSGLTGPPGSP

SEQ ID NO: 8833 - protein, 33 aa, synthetic construct
  REGION 1..33: note = Description of Artificial Sequence: Synthetic polypeptide
GTAEAASASGTTARAGGAGNLAPEGLTTPPGSP

SEQ ID NO: 8834 - protein, 33 aa, synthetic construct
  REGION 1..33: note = Description of Artificial Sequence: Synthetic polypeptide
GTAEAASASGTTSRAGAAENLTPTGLTGPPGSP

SEQ ID NO: 8835 - protein, 33 aa, synthetic construct
  REGION 1..33: note = Description of Artificial Sequence: Synthetic polypeptide
GTAEAASASGTYGRTTTPGNEPPASLEAEPGSP

SEQ ID NO: 8836 - protein, 33 aa, synthetic construct
  REGION 1..33: note = Description of Artificial Sequence: Synthetic polypeptide
GTAEAASASGTYSRGESGPNEPPPGLTGPPGSP

SEQ ID NO: 8837 - protein, 33 aa, synthetic construct
  REGION 1..33: note = Description of Artificial Sequence: Synthetic polypeptide
GTAEAASASGAWGRTGASENETPAPLGGEPGSP

SEQ ID NO: 8838 - protein, 33 aa, synthetic construct
  REGION 1..33: note = Description of Artificial Sequence: Synthetic polypeptide
GTAEAASASGRWGRAETTPNTPPEGLETEPGSP

SEQ ID NO: 8839 - protein, 33 aa, synthetic construct
  REGION 1..33: note = Description of Artificial Sequence: Synthetic polypeptide
GTAEAASASGESGRAANHTGAEPPELGAGPGSP

SEQ ID NO: 8840 - protein, 33 aa, synthetic construct
  REGION 1..33: note = Description of Artificial Sequence: Synthetic polypeptide
GTAEAASASGTTGRAGEAANLTPAGLTESPGSP

SEQ ID NO: 8841 - protein, 33 aa, synthetic construct
  REGION 1..33: note = Description of Artificial Sequence: Synthetic polypeptide
GTAEAASASGTTGRAGEAANLTPAALTESPGSP

SEQ ID NO: 8842 - protein, 33 aa, synthetic construct
  REGION 1..33: note = Description of Artificial Sequence: Synthetic polypeptide
GTAEAASASGTTGRAGEAANLTPAPLTESPGSP

SEQ ID NO: 8843 - protein, 33 aa, synthetic construct
  REGION 1..33: note = Description of Artificial Sequence: Synthetic polypeptide
GTAEAASASGTTGRAGEAANLTPEPLTESPGSP

SEQ ID NO: 8844 - protein, 33 aa, synthetic construct
  REGION 1..33: note = Description of Artificial Sequence: Synthetic polypeptide
GTAEAASASGTTGRAGEAANLTPAGLTGAPGSP

SEQ ID NO: 8845 - protein, 33 aa, synthetic construct
  REGION 1..33: note = Description of Artificial Sequence: Synthetic polypeptide
GTAEAASASGTTGRAGEAANLTPEGLTGAPGSP

SEQ ID NO: 8846 - protein, 33 aa, synthetic construct
  REGION 1..33: note = Description of Artificial Sequence: Synthetic polypeptide
GTAEAASASGTTGRAGEAANLTPEPLTGAPGSP

SEQ ID NO: 8847 - protein, 33 aa, synthetic construct
  REGION 1..33: note = Description of Artificial Sequence: Synthetic polypeptide
GTAEAASASGTTGRAGEAANLTPAGLTEAPGSP

SEQ ID NO: 8848 - protein, 33 aa, synthetic construct
  REGION 1..33: note = Description of Artificial Sequence: Synthetic polypeptide
GTAEAASASGTTGRAGEAANLTPEGLTEAPGSP

SEQ ID NO: 8849 - protein, 33 aa, synthetic construct
  REGION 1..33: note = Description of Artificial Sequence: Synthetic polypeptide
GTAEAASASGTTGRAGEAANLTPAPLTEAPGSP

SEQ ID NO: 8850 - protein, 33 aa, synthetic construct
  REGION 1..33: note = Description of Artificial Sequence: Synthetic polypeptide
GTAEAASASGTTGRAGEAANLTPEPLTEAPGSP

SEQ ID NO: 8851 - protein, 33 aa, synthetic construct
  REGION 1..33: note = Description of Artificial Sequence: Synthetic polypeptide
GTAEAASASGTTGRAGEAANLTPEPLTGPPGSP

SEQ ID NO: 8852 - protein, 33 aa, synthetic construct
  REGION 1..33: note = Description of Artificial Sequence: Synthetic polypeptide
GTAEAASASGTTGRAGEAANLTPAGLTGGPGSP

SEQ ID NO: 8853 - protein, 33 aa, synthetic construct
  REGION 1..33: note = Description of Artificial Sequence: Synthetic polypeptide
GTAEAASASGTTGRAGEAANLTPEGLTGGPGSP

SEQ ID NO: 8854 - protein, 33 aa, synthetic construct
  REGION 1..33: note = Description of Artificial Sequence: Synthetic polypeptide
GTAEAASASGTTGRAGEAANLTPEALTGGPGSP

SEQ ID NO: 8855 - protein, 33 aa, synthetic construct
  REGION 1..33: note = Description of Artificial Sequence: Synthetic polypeptide
GTAEAASASGTTGRAGEAANLTPEPLTGGPGSP

SEQ ID NO: 8856 - protein, 33 aa, synthetic construct
  REGION 1..33: note = Description of Artificial Sequence: Synthetic polypeptide
GTAEAASASGTTGRAGEAANLTPAGLTEGPGSP

SEQ ID NO: 8857 - protein, 33 aa, synthetic construct
  REGION 1..33: note = Description of Artificial Sequence: Synthetic polypeptide
GTAEAASASGTTGRAGEAANLTPEGLTEGPGSP

SEQ ID NO: 8858 - protein, 33 aa, synthetic construct
  REGION 1..33: note = Description of Artificial Sequence: Synthetic polypeptide
GTAEAASASGTTGRAGEAANLTPAPLTEGPGSP

SEQ ID NO: 8859 - protein, 33 aa, synthetic construct
  REGION 1..33: note = Description of Artificial Sequence: Synthetic polypeptide
GTAEAASASGTTGRAGEAANLTPEPLTEGPGSP

SEQ ID NO: 8860 - protein, 30 aa, synthetic construct
  REGION 1..30: note = Description of Artificial Sequence: Synthetic polypeptide
GTAEAASASGEAGRSAEATSAGATGPPGSP

SEQ ID NO: 8861 - protein, 30 aa, synthetic construct
  REGION 1..30: note = Description of Artificial Sequence: Synthetic polypeptide
GTAEAASASGSASGTYSRGESGPGSPPGSP

SEQ ID NO: 8862 - protein, 30 aa, synthetic construct
  REGION 1..30: note = Description of Artificial Sequence: Synthetic polypeptide
GTAEAASASGSASGEAGRTDTHPGSPPGSP

SEQ ID NO: 8863 - protein, 30 aa, synthetic construct
  REGION 1..30: note = Description of Artificial Sequence: Synthetic polypeptide
GTAEAASASGSASGEPGRAAEHPGSPPGSP

SEQ ID NO: 8864 - protein, 30 aa, synthetic construct
  REGION 1..30: note = Description of Artificial Sequence: Synthetic polypeptide
GTAEAASASGSPAGESSRGTTIAGSPPGSP

SEQ ID NO: 8865 - protein, 30 aa, synthetic construct
  REGION 1..30: note = Description of Artificial Sequence: Synthetic polypeptide
GTAEAASASGEAGESAGATPAGLTGPPGSP

SEQ ID NO: 8866 - protein, 30 aa, synthetic construct
  REGION 1..30: note = Description of Artificial Sequence: Synthetic polypeptide
GTAEAASASGSASGAPLELEAGPGSPPGSP

SEQ ID NO: 8867 - protein, 30 aa, synthetic construct
  REGION 1..30: note = Description of Artificial Sequence: Synthetic polypeptide
GTAEAASASGSASGEPPELGAGPGSPPGSP

SEQ ID NO: 8868 - protein, 30 aa, synthetic construct
  REGION 1..30: note = Description of Artificial Sequence: Synthetic polypeptide
GTAEAASASGSASGEPSGLTEGPGSPPGSP

SEQ ID NO: 8869 - protein, 30 aa, synthetic construct
  REGION 1..30: note = Description of Artificial Sequence: Synthetic polypeptide
GTAEAASASGSASGTPAPLTEPPGSPPGSP

SEQ ID NO: 8870 - protein, 30 aa, synthetic construct
  REGION 1..30: note = Description of Artificial Sequence: Synthetic polypeptide
GTAEAASASGSASGTPAELTEPPGSPPGSP

SEQ ID NO: 8871 - protein, 30 aa, synthetic construct
  REGION 1..30: note = Description of Artificial Sequence: Synthetic polypeptide
GTAEAASASGSASGPPPGLTGPPGSPPGSP

SEQ ID NO: 8872 - protein, 30 aa, synthetic construct
  REGION 1..30: note = Description of Artificial Sequence: Synthetic polypeptide
GTAEAASASGSASGTPAPLGGEPGSPPGSP

SEQ ID NO: 8873 - protein, 30 aa, synthetic construct
  REGION 1..30: note = Description of Artificial Sequence: Synthetic polypeptide
GTAEAASASGSPAGAPEGLTGPAGSPPGSP

SEQ ID NO: 8874 - protein, 30 aa, synthetic construct
  REGION 1..30: note = Description of Artificial Sequence: Synthetic polypeptide
GTAEAASASGSPAGPPEGLETEAGSPPGSP

SEQ ID NO: 8875 - protein, 30 aa, synthetic construct
  REGION 1..30: note = Description of Artificial Sequence: Synthetic polypeptide
GTAEAASASGSPTSGQGGLTGPGSEPPGSP

SEQ ID NO: 8876 - protein, 30 aa, synthetic construct
  REGION 1..30: note = Description of Artificial Sequence: Synthetic polypeptide
GTAEAASASGSESAPPEGLETESTEPPGSP

SEQ ID NO: 8877 - protein, 30 aa, synthetic construct
  REGION 1..30: note = Description of Artificial Sequence: Synthetic polypeptide
GTAEAASASGSEGSEPLELGAASETPPGSP

SEQ ID NO: 8878 - protein, 30 aa, synthetic construct
  REGION 1..30: note = Description of Artificial Sequence: Synthetic polypeptide
GTAEAASASGSEGSGPAGLEAPSETPPGSP

SEQ ID NO: 8879 - protein, 30 aa, synthetic construct
  REGION 1..30: note = Description of Artificial Sequence: Synthetic polypeptide
GTAEAASASGSEPTPPASLEAEPGSPPGSP

SEQ ID NO: 8880 - protein, 10 aa, synthetic construct
  REGION 1..10: note = Description of Artificial Sequence: Synthetic peptide
TPGTSTEPSE

SEQ ID NO: 8881 - protein, 14 aa, synthetic construct
  REGION 1..14: note = Description of Artificial Sequence: Synthetic peptide
GSAPGSEPATSGSE

SEQ ID NO: 8882 - protein, 864 aa, synthetic construct; identical to SEQ ID NO: 690
  REGION 1..864: note = Description of Artificial Sequence: Synthetic polypeptide

SEQ ID NO: 8883 - protein, 288 aa, synthetic construct; identical to SEQ ID NO: 686
  REGION 1..288: note = Description of Artificial Sequence: Synthetic polypeptide

SEQ ID NO: 8884 - protein, 5 aa, synthetic construct
  REGION 1..5: note = Description of Artificial Sequence: Synthetic peptide
SATPE

SEQ ID NO: 8885 - protein, 13 aa, synthetic construct
  REGION 1..13: note = Description of Artificial Sequence: Synthetic peptide
SGPGSEPATSGSE

SEQ ID NO: 8886 - protein, 12 aa, synthetic construct
  REGION 1..12: note = Description of Artificial Sequence: Synthetic peptide
GSAPGTSTEPSE

SEQ ID NO: 8887 - protein, 6 aa, synthetic construct
  REGION 1..6: note = Description of Artificial Sequence: Synthetic peptide
TPGTSE

SEQ ID NO: 8888 - protein, 11 aa, synthetic construct
  REGION 1..11: note = Description of Artificial Sequence: Synthetic peptide
SGPGTSTEPSE

SEQ ID NO: 8889 - protein, 8 aa, synthetic construct
  REGION 1..8: note = Description of Artificial Sequence: Synthetic peptide
GSAPGTSE

SEQ ID NO: 8890 - protein, 8 aa, synthetic construct
  REGION 1..8: note = Description of Artificial Sequence: Synthetic peptide
GTSTEPSE

SEQ ID NO: 8891 - protein, 16 aa, synthetic construct
  REGION 1..16: note = Description of Artificial Sequence: Synthetic peptide
GSAPGSPAGSPTSTEE

SEQ ID NO: 8892 - protein, 7 aa, synthetic construct
  REGION 1..7: note = Description of Artificial Sequence: Synthetic peptide
SGPGTSE

SEQ ID NO: 8893 - protein, 15 aa, synthetic construct
  REGION 1..15: note = Description of Artificial Sequence: Synthetic peptide
SGPGSPAGSPTSTEE

SEQ ID NO: 8894 - protein, 12 aa, synthetic construct
  REGION 1..12: note = Description of Artificial Sequence: Synthetic peptide
TPGSEPATSGSE

SEQ ID NO: 8895 - protein, 14 aa, synthetic construct
  REGION 1..14: note = Description of Artificial Sequence: Synthetic peptide
TPGSPAGSPTSTEE

SEQ ID NO: 8896 - protein, 292 aa, synthetic construct; identical to SEQ ID NO: 725
  REGION 1..292: note = Description of Artificial Sequence: Synthetic polypeptide

SEQ ID NO: 8897 - protein, 584 aa, synthetic construct; identical to SEQ ID NO: 732
  REGION 1..584: note = Description of Artificial Sequence: Synthetic polypeptide

SEQ ID NO: 8898 - protein, 23 aa, synthetic construct
  REGION 1..23: note = Description of Artificial Sequence: Synthetic peptide
MKKNIAFLLASMFVFSIATNAYA

SEQ ID NO: 8899 - protein, 13 aa, synthetic construct
  REGION 1..13: note = Description of Artificial Sequence: Synthetic peptide
SGPGSTPAESGSE

SEQ ID NO: 8900 - protein, 10 aa, synthetic construct
  REGION 1..10: note = Description of Artificial Sequence: Synthetic peptide
GYTFTRYTMH

SEQ ID NO: 8901 - protein, 17 aa, synthetic construct
  REGION 1..17: note = Description of Artificial Sequence: Synthetic peptide
YINPSRGYTNYNQKVKD

SEQ ID NO: 8902 - protein, 10 aa, synthetic construct
  REGION 1..10: note = Description of Artificial Sequence: Synthetic peptide
YYDDHYCLDY

SEQ ID NO: 8903 - protein, 10 aa, synthetic construct
  REGION 1..10: note = Description of Artificial Sequence: Synthetic peptide
GYTFTSYTMH

SEQ ID NO: 8904 - protein, 17 aa, synthetic construct
  REGION 1..17: note = Description of Artificial Sequence: Synthetic peptide
YINPSSGYTKYNQKFKD

SEQ ID NO: 8905 - protein, 10 aa, synthetic construct
  REGION 1..10: note = Description of Artificial Sequence: Synthetic peptide
WQDYDVYFDY

SEQ ID NO: 8906 - protein, 17 aa, synthetic construct
  REGION 1..17: note = Description of Artificial Sequence: Synthetic peptide
YINPSRGYTNYNQKFKD

SEQ ID NO: 8907 - protein, 17 aa, synthetic construct
  REGION 1..17: note = Description of Artificial Sequence: Synthetic peptide
YINPSRGYTNYADSVKG

SEQ ID NO: 8908 - protein, 10 aa, synthetic construct
  REGION 1..10: note = Description of Artificial Sequence: Synthetic peptide
SASSSVSYMN

SEQ ID NO: 8909 - protein, 7 aa, synthetic construct
  REGION 1..7: note = Description of Artificial Sequence: Synthetic peptide
DTSKLAS

SEQ ID NO: 8910 - protein, 9 aa, synthetic construct
  REGION 1..9: note = Description of Artificial Sequence: Synthetic peptide
QQWSSNPFT

SEQ ID NO: 8911 - protein, 10 aa, synthetic construct
  REGION 1..10: note = Description of Artificial Sequence: Synthetic peptide
RASSSVSYMH

SEQ ID NO: 8912 - protein, 7 aa, synthetic construct
  REGION 1..7: note = Description of Artificial Sequence: Synthetic peptide
ATSNLAS

SEQ ID NO: 8913 - protein, 9 aa, synthetic construct
  REGION 1..9: note = Description of Artificial Sequence: Synthetic peptide
QQWSSNPPT

SEQ ID NO: 8914 - protein, 10 aa, synthetic construct
  REGION 1..10: note = Description of Artificial Sequence: Synthetic peptide
RASSSVSYMN

SEQ ID NO: 8915 - protein, 7 aa, synthetic construct
  REGION 1..7: note = Description of Artificial Sequence: Synthetic peptide
DTSKVAS

SEQ ID NO: 8916 - protein, 9 aa, synthetic construct
  REGION 1..9: note = Description of Artificial Sequence: Synthetic peptide
QQWSSNPLT

SEQ ID NO: 8917 - protein, 10 aa, synthetic construct
  REGION 1..10: note = Description of Artificial Sequence: Synthetic peptide
RASQSVSYMN

SEQ ID NO: 8918 - protein, 5 aa, synthetic construct
  REGION 1..5: note = Description of Artificial Sequence: Synthetic peptide
DTYIH

SEQ ID NO: 8919 - protein, 17 aa, synthetic construct
  REGION 1..17: note = Description of Artificial Sequence: Synthetic peptide
RIDPANGYTKYDPKFQG

SEQ ID NO: 8920 - protein, 14 aa, synthetic construct
  REGION 1..14: note = Description of Artificial Sequence: Synthetic peptide
EGYYGNYGVYAMDY

SEQ ID NO: 8921 - protein, 10 aa, synthetic construct
  REGION 1..10: note = Description of Artificial Sequence: Synthetic peptide
GFTFSSYDIH

SEQ ID NO: 8922 - protein, 12 aa, synthetic construct
  REGION 1..12: note = Description of Artificial Sequence: Synthetic peptide
GPAGDTYYPGSV

SEQ ID NO: 8923 - protein, 13 aa, synthetic construct
  REGION 1..13: note = Description of Artificial Sequence: Synthetic peptide
GLITFGGLIAPFD

SEQ ID NO: 8924 - protein, 7 aa, synthetic construct
  REGION 1..7: note = Description of Artificial Sequence: Synthetic peptide
GFNIKDS

SEQ ID NO: 8925 - protein, 6 aa, synthetic construct
  REGION 1..6: note = Description of Artificial Sequence: Synthetic peptide
DPENGD

SEQ ID NO: 8926 - protein, 9 aa, synthetic construct
  REGION 1..9: note = Description of Artificial Sequence: Synthetic peptide
TPTGPYYFD

SEQ ID NO: 8927 - protein, 5 aa, synthetic construct
  REGION 1..5: note = Description of Artificial Sequence: Synthetic peptide
DTYMH

SEQ ID NO: 8928 - protein, 17 aa, synthetic construct
  REGION 1..17: note = Description of Artificial Sequence: Synthetic peptide
RIDPANGNSKYADSVKG

SEQ ID NO: 8929 - protein, 12 aa, synthetic construct
  REGION 1..12: note = Description of Artificial Sequence: Synthetic peptide
FGYYVSDYAMAY

SEQ ID NO: 8930 - protein, 4 aa, synthetic construct
  REGION 1..4: note = Description of Artificial Sequence: Synthetic peptide
DTYM

SEQ ID NO: 8931 - protein, 17 aa, synthetic construct
  REGION 1..17: note = Description of Artificial Sequence: Synthetic peptide
RIDPANGNSKYVPKFQG

SEQ ID NO: 8932 - protein, 5 aa, synthetic construct
  REGION 1..5: note = Description of Artificial Sequence: Synthetic peptide
TYWMS

SEQ ID NO: 8933 - protein, 17 aa, synthetic construct
  REGION 1..17: note = Description of Artificial Sequence: Synthetic peptide
EIHPDSSTINYAPSLKD

SEQ ID NO: 8934 - protein, 10 aa, synthetic construct
  REGION 1..10: note = Description of Artificial Sequence: Synthetic peptide
LYFGFPWFAY

SEQ ID NO: 8935 - protein, 10 aa, synthetic construct
  REGION 1..10: note = Description of Artificial Sequence: Synthetic peptide
GFTFTDYYMN

SEQ ID NO: 8936 - protein, 16 aa, synthetic construct
  REGION 1..16: note = Description of Artificial Sequence: Synthetic peptide
FIGNKANGYTTEYSAS

SEQ ID NO: 8937 - protein, 8 aa, synthetic construct
  REGION 1..8: note = Description of Artificial Sequence: Synthetic peptide
TYYCTRDR

SEQ ID NO: 8938 - protein, 5 aa, synthetic construct
  REGION 1..5: note = Description of Artificial Sequence: Synthetic peptide
SYWMH

SEQ ID NO: 8939 - protein, 19 aa, synthetic construct
  REGION 1..19: note = Description of Artificial Sequence: Synthetic peptide
FIRNKANGGTTEYAASVKG

SEQ ID NO: 8940 - protein, 10 aa, synthetic construct
  REGION 1..10: note = Description of Artificial Sequence: Synthetic peptide
DRGLRFYFDY

SEQ ID NO: 8941 - protein, 5 aa, synthetic construct
  REGION 1..5: note = Description of Artificial Sequence: Synthetic peptide
SYWMN

SEQ ID NO: 8942 - protein, 17 aa, synthetic construct
  REGION 1..17: note = Description of Artificial Sequence: Synthetic peptide
QIWPGDGDTNYNGKFKG

SEQ ID NO: 8943 - protein, 15 aa, synthetic construct
  REGION 1..15: note = Description of Artificial Sequence: Synthetic peptide
RETTTVGRYYYAMDY

SEQ ID NO: 8944 - protein, 5 aa, synthetic construct
  REGION 1..5: note = Description of Artificial Sequence: Synthetic peptide
DYAMH

SEQ ID NO: 8945 - protein, 17 aa, synthetic construct
  REGION 1..17: note = Description of Artificial Sequence: Synthetic peptide
TISWNSGSIGYADSVKG

SEQ ID NO: 8946 - protein, 13 aa, synthetic construct
  REGION 1..13: note = Description of Artificial Sequence: Synthetic peptide
DIQYGNYYYGMDV

SEQ ID NO: 8947 - protein, 5 aa, synthetic construct
  REGION 1..5: note = Description of Artificial Sequence: Synthetic peptide
SYNMH

SEQ ID NO: 8948 - protein, 17 aa, synthetic construct
  REGION 1..17: note = Description of Artificial Sequence: Synthetic peptide
AIYPGNGDTSYNQKFKG

SEQ ID NO: 8949 - protein, 13 aa, synthetic construct
  REGION 1..13: note = Description of Artificial Sequence: Synthetic peptide
VVYYSNSYWYFDV

SEQ ID NO: 8950 - protein, 5 aa, synthetic construct
  REGION 1..5: note = Description of Artificial Sequence: Synthetic peptide
YSWIN

SEQ ID NO: 8951 - protein, 17 aa, synthetic construct
  REGION 1..17: note = Description of Artificial Sequence: Synthetic peptide
RIFPGDGDTDYNGKFKG

SEQ ID NO: 8952 - protein, 10 aa, synthetic construct
  REGION 1..10: note = Description of Artificial Sequence: Synthetic peptide
NVFDGYWLVY

SEQ ID NO: 8953 - protein, 8 aa, synthetic construct
  REGION 1..8: note = Description of Artificial Sequence: Synthetic peptide
GYTFTSYN

SEQ ID NO: 8954 - protein, 8 aa, synthetic construct
  REGION 1..8: note = Description of Artificial Sequence: Synthetic peptide
IYPGNGDT

SEQ ID NO: 8955 - protein, 14 aa, synthetic construct
  REGION 1..14: note = Description of Artificial Sequence: Synthetic peptide
ARSTYYGGDWYFNV

SEQ ID NO: 8956 - protein, 15 aa, synthetic construct
  REGION 1..15: note = Description of Artificial Sequence: Synthetic peptide
AIYPGNGDTSYNQKF

SEQ ID NO: 8957 - protein, 10 aa, synthetic construct
  REGION 1..10: note = Description of Artificial Sequence: Synthetic peptide
GYTITDSNIH

SEQ ID NO: 8958 - protein, 17 aa, synthetic construct
  REGION 1..17: note = Description of Artificial Sequence: Synthetic peptide
YIYPYNGGTDYNQKFKN

SEQ ID NO: 8959 - protein, 7 aa, synthetic construct
  REGION 1..7: note = Description of Artificial Sequence: Synthetic peptide
GNPWLAY

SEQ ID NO: 8960 - protein, 8 aa, synthetic construct
  REGION 1..8: note = Description of Artificial Sequence: Synthetic peptide
GFTFNSFA

SEQ ID NO: 8961 - protein, 8 aa, synthetic construct
  REGION 1..8: note = Description of Artificial Sequence: Synthetic peptide
ISGSGGGT

SEQ ID NO: 8962 - protein, 15 aa, synthetic construct
  REGION 1..15: note = Description of Artificial Sequence: Synthetic peptide
AKDKILWFGEPVFDY

SEQ ID NO: 8963 - protein, 10 aa, synthetic construct
  REGION 1..10: note = Description of Artificial Sequence: Synthetic peptide
GYTFTNYGMN

SEQ ID NO: 8964 - protein, 17 aa, synthetic construct
  REGION 1..17: note = Description of Artificial Sequence: Synthetic peptide
WINTYTGEPTYADAFKG

SEQ ID NO: 8965 - protein, 9 aa, synthetic construct
  REGION 1..9: note = Description of Artificial Sequence: Synthetic peptide
DYGDYGMDY

SEQ ID NO: 8966 - protein, 10 aa, synthetic construct
  REGION 1..10: note = Description of Artificial Sequence: Synthetic peptide
GYTFSTYWIE

SEQ ID NO: 8967 - protein, 17 aa, synthetic construct
  REGION 1..17: note = Description of Artificial Sequence: Synthetic peptide
EILGPSGYTDYNEKFKA

SEQ ID NO: 8968 - protein, 9 aa, synthetic construct
  REGION 1..9: note = Description of Artificial Sequence: Synthetic peptide
WDRLYAMDY

SEQ ID NO: 8969 - protein, 5 aa, synthetic construct
  REGION 1..5: note = Description of Artificial Sequence: Synthetic peptide
SYIMH

SEQ ID NO: 8970 - protein, 17 aa, synthetic construct
  REGION 1..17: note = Description of Artificial Sequence: Synthetic peptide
VISYDGRNKYYADSVKG

SEQ ID NO: 8971 - protein, 9 aa, synthetic construct
  REGION 1..9: note = Description of Artificial Sequence: Synthetic peptide
DTDGYDFDY

SEQ ID NO: 8972 - protein, 5 aa, synthetic construct
  REGION 1..5: note = Description of Artificial Sequence: Synthetic peptide
YYAMH

SEQ ID NO: 8973 - protein, 17 aa, synthetic construct
  REGION 1..17: note = Description of Artificial Sequence: Synthetic peptide
VISYDGSIKYYADSVKG

SEQ ID NO: 8974 - protein, 10 aa, synthetic construct
  REGION 1..10: note = Description of Artificial Sequence: Synthetic peptide
EGPYSNYLDY

SEQ ID NO: 8975 - protein, 5 aa, synthetic construct
  REGION 1..5: note = Description of Artificial Sequence: Synthetic peptide
DYGMH

SEQ ID NO: 8976 - protein, 17 aa, synthetic construct
  REGION 1..17: note = Description of Artificial Sequence: Synthetic peptide
VIWYDGSNKYYADSVKG

SEQ ID NO: 8977 - protein, 9 aa, synthetic construct
  REGION 1..9: note = Description of Artificial Sequence: Synthetic peptide
DSIMVRGDY

SEQ ID NO: 8978 - protein, 5 aa, synthetic construct
  REGION 1..5: note = Description of Artificial Sequence: Synthetic peptide
DHGMH

SEQ ID NO: 8979 - protein, 7 aa, synthetic construct
  REGION 1..7: note = Description of Artificial Sequence: Synthetic peptide
SDYYYWS

SEQ ID NO: 8980 - protein, 16 aa, synthetic construct
  REGION 1..16: note = Description of Artificial Sequence: Synthetic peptide
YIYYSGSTNYNPSLKS

SEQ ID NO: 8981 - protein, 10 aa, synthetic construct
  REGION 1..10: note = Description of Artificial Sequence: Synthetic peptide
GDGDYGGNCF

SEQ ID NO: 8982 - protein, 5 aa, synthetic construct
  REGION 1..5: note = Description of Artificial Sequence: Synthetic peptide
SYGFS

SEQ ID NO: 8983 - protein, 17 aa, synthetic construct
  REGION 1..17: note = Description of Artificial Sequence: Synthetic peptide
WISASNGNTYYAQKLQG

SEQ ID NO: 8984 - protein, 8 aa, synthetic construct
  REGION 1..8: note = Description of Artificial Sequence: Synthetic peptide
VYADYADY

SEQ ID NO: 8985 - protein, 8 aa, synthetic construct
  REGION 1..8: note = Description of Artificial Sequence: Synthetic peptide
GYTFTDYY

SEQ ID NO: 8986 - protein, 9 aa, synthetic construct
  REGION 1..9: note = Description of Artificial Sequence: Synthetic peptide
VNPNRRGTT

SEQ ID NO: 8987 - protein, 8 aa, synthetic construct
  REGION 1..8: note = Description of Artificial Sequence: Synthetic peptide
ARANWLDY

SEQ ID NO: 8988 - protein, 5 aa, synthetic construct
  REGION 1..5: note = Description of Artificial Sequence: Synthetic peptide
SYWLH

SEQ ID NO: 8989 - protein, 17 aa, synthetic construct
  REGION 1..17: note = Description of Artificial Sequence: Synthetic peptide
MIDPSNSDTRFNPNFKD

SEQ ID NO: 8990 - protein, 12 aa, synthetic construct
  REGION 1..12: note = Description of Artificial Sequence: Synthetic peptide
ATYRSYVTPLDY

SEQ ID NO: 8991 - protein, 10 aa, synthetic construct
  REGION 1..10: note = Description of Artificial Sequence: Synthetic peptide
GFTFSSYGMH

SEQ ID NO: 8992 - protein, 15 aa, synthetic construct
  REGION 1..15: note = Description of Artificial Sequence: Synthetic peptide
VIWYDGSNKYYADSV

SEQ ID NO: 8993 - protein, 16 aa, synthetic construct
  REGION 1..16: note = Description of Artificial Sequence: Synthetic peptide
DPRGATLYYYYYGMDV

SEQ ID NO: 8994 - protein, 5 aa, synthetic construct
  REGION 1..5: note = Description of Artificial Sequence: Synthetic peptide
SYTMH

SEQ ID NO: 8995 - protein, 17 aa, synthetic construct
  REGION 1..17: note = Description of Artificial Sequence: Synthetic peptide
FISYDGNNKYYADSVKG

SEQ ID NO: 8996 - protein, 9 aa, synthetic construct
  REGION 1..9: note = Description of Artificial Sequence: Synthetic peptide
TGWLGPFDY

SEQ ID NO: 8997 - protein, 5 aa, synthetic construct
  REGION 1..5: note = Description of Artificial Sequence: Synthetic peptide
SGGYY

SEQ ID NO: 8998 - protein, 16 aa, synthetic construct
  REGION 1..16: note = Description of Artificial Sequence: Synthetic peptide
IIYYSGSTYYNPSLKS

SEQ ID NO: 8999 - protein, 13 aa, synthetic construct
  REGION 1..13: note = Description of Artificial Sequence: Synthetic peptide
VAIVTTIPGGMDV

SEQ ID NO: 9000 - protein, 5 aa, synthetic construct
  REGION 1..5: note = Description of Artificial Sequence: Synthetic peptide
NYWLG

SEQ ID NO: 9001 - protein, 17 aa, synthetic construct
  REGION 1..17: note = Description of Artificial Sequence: Synthetic peptide
DIFPGSGNIHYNEKFKG

SEQ ID NO: 9002 - protein, 10 aa, synthetic construct
  REGION 1..10: note = Description of Artificial Sequence: Synthetic peptide
LRNWDEPMDY

SEQ ID NO: 9003 - protein, 5 aa, synthetic construct
  REGION 1..5: note = Description of Artificial Sequence: Synthetic peptide
SYGMH

SEQ ID NO: 9004 - protein, 17 aa, synthetic construct
  REGION 1..17: note = Description of Artificial Sequence: Synthetic peptide
VISYDGSNKYYADSVKG

SEQ ID NO: 9005 - protein, 18 aa, synthetic construct
  REGION 1..18: note = Description of Artificial Sequence: Synthetic peptide
DMGWGSGWRPYYYYGMDV

SEQ ID NO: 9006 - protein, 8 aa, synthetic construct
  REGION 1..8: note = Description of Artificial Sequence: Synthetic peptide
GYAFTNYL

SEQ ID NO: 9007 - protein, 8 aa, synthetic construct
  REGION 1..8: note = Description of Artificial Sequence: Synthetic peptide
INPGSGGT

SEQ ID NO: 9008 - protein, 9 aa, synthetic construct
  REGION 1..9: note = Description of Artificial Sequence: Synthetic peptide
ARDGPWFAY

SEQ ID NO: 9009 - protein, 13 aa, synthetic construct
  REGION 1..13: note = Description of Artificial Sequence: Synthetic peptide
WINTYTGEPTYAD

SEQ ID NO: 9010 - protein, 5 aa, synthetic construct
  REGION 1..5: note = Description of Artificial Sequence: Synthetic peptide
SKGDY

SEQ ID NO: 9011 - protein, 10 aa, synthetic construct
  REGION 1..10: note = Description of Artificial Sequence: Synthetic peptide
GYTFTDHAIH

SEQ ID NO: 9012 - protein, 13 aa, synthetic construct
  REGION 1..13: note = Description of Artificial Sequence: Synthetic peptide
YFSPGNDDFKYNE

SEQ ID NO: 9013 - protein, 6 aa, synthetic construct
  REGION 1..6: note = Description of Artificial Sequence: Synthetic peptide
SLNMAY

SEQ ID NO: 9014 - protein, 13 aa, synthetic construct
  REGION 1..13: note = Description of Artificial Sequence: Synthetic peptide
WINTYTGEPTYGE

SEQ ID NO: 9015 - protein, 5 aa, synthetic construct
  REGION 1..5: note = Description of Artificial Sequence: Synthetic peptide
NYVDY

SEQ ID NO: 9016 - protein, 5 aa, synthetic construct
  REGION 1..5: note = Description of Artificial Sequence: Synthetic peptide
NYGMN

SEQ ID NO: 9017 - protein, 17 aa, synthetic construct
  REGION 1..17: note = Description of Artificial Sequence: Synthetic peptide
WINTYTGESTYADSFKG

SEQ ID NO: 9018 - protein, 6 aa, synthetic construct
  REGION 1..6: note = Description of Artificial Sequence: Synthetic peptide
FAIKGD

SEQ ID NO: 9019 - protein, 7 aa, synthetic construct
  REGION 1..7: note = Description of Artificial Sequence: Synthetic peptide
FAIKGDY

SEQ ID NO: 9020 - protein, 5 aa, synthetic construct
  REGION 1..5: note = Description of Artificial Sequence: Synthetic peptide
HYMMA

SEQ ID NO: 9021 - protein, 17 aa, synthetic construct
  REGION 1..17: note = Description of Artificial Sequence: Synthetic peptide
RIGPSGGPTHYADSVKG

SEQ ID NO: 9022 - protein, 15 aa, synthetic construct
  REGION 1..15: note = Description of Artificial Sequence: Synthetic peptide
YDYVAVAGPAEYFQH

SEQ ID NO: 9023 - protein, 8 aa, synthetic construct
  REGION 1..8: note = Description of Artificial Sequence: Synthetic peptide
GFTFSGYG

SEQ ID NO: 9024 - protein, 8 aa, synthetic construct
  REGION 1..8: note = Description of Artificial Sequence: Synthetic peptide
ISSGGSYT

SEQ ID NO: 9025 - protein, 10 aa, synthetic construct
  REGION 1..10: note = Description of Artificial Sequence: Synthetic peptide
ARHGDDPAWF

SEQ ID NO: 9026 - protein, 5 aa, synthetic construct
  REGION 1..5: note = Description of Artificial Sequence: Synthetic peptide
GYFMN

SEQ ID NO: 9027 - protein, 17 aa, synthetic construct
  REGION 1..17: note = Description of Artificial Sequence: Synthetic peptide
RIHPYDGDTFYNQKFQG

SEQ ID NO: 9028 - protein, 9 aa, synthetic construct
  REGION 1..9: note = Description of Artificial Sequence: Synthetic peptide
YDGSRAMDY

SEQ ID NO: 9029 - protein, 8 aa, synthetic construct
  REGION 1..8: note = Description of Artificial Sequence: Synthetic peptide
YDGSRAMD

SEQ ID NO: 9030 - protein, 17 aa, synthetic construct
  REGION 1..17: note = Description of Artificial Sequence: Synthetic peptide
RIFPYNGDTFYNQKFKG

SEQ ID NO: 9031 - protein, 7 aa, synthetic construct
  REGION 1..7: note = Description of Artificial Sequence: Synthetic peptide
GTHYFDY

SEQ ID NO: 9032 - protein, 5 aa, synthetic construct
  REGION 1..5: note = Description of Artificial Sequence: Synthetic peptide
DYEMH

SEQ ID NO: 9033 - protein, 17 aa, synthetic construct
  REGION 1..17: note = Description of Artificial Sequence: Synthetic peptide
ALDPKTGDTAYSQKFKG

SEQ ID NO: 9034 - protein, 6 aa, synthetic construct
  REGION 1..6: note = Description of Artificial Sequence: Synthetic peptide
FYSYTY

SEQ ID NO: 9035 - protein, 5 aa, synthetic construct
  REGION 1..5: note = Description of Artificial Sequence: Synthetic peptide
SYWIA

SEQ ID NO: 9036 - protein, 17 aa, synthetic construct
  REGION 1..17: note = Description of Artificial Sequence: Synthetic peptide
IIFPGDSDTRYSPSFQG

SEQ ID NO: 9037 - protein, 8 aa, synthetic construct
  REGION 1..8: note = Description of Artificial Sequence: Synthetic peptide
TREGYFDY

SEQ ID NO: 9038 - protein, 5 aa, synthetic construct
  REGION 1..5: note = Description of Artificial Sequence: Synthetic peptide
NYWIA

SEQ ID NO: 9039 - protein, 17 aa, synthetic construct
  REGION 1..17: note = Description of Artificial Sequence: Synthetic peptide
IIYPGDSDTRYSPSFQG

SEQ ID NO: 9040 - protein, 5 aa, synthetic construct
  REGION 1..5: note = Description of Artificial Sequence: Synthetic peptide
NYWIG

SEQ ID NO: 9041 - protein, 8 aa, synthetic construct
  REGION 1..8: note = Description of Artificial Sequence: Synthetic peptide
TREGFFDY

SEQ ID NO: 9042 - protein, 10 aa, synthetic construct
  REGION 1..10: note = Description of Artificial Sequence: Synthetic peptide
GFTFRNYGMH

SEQ ID NO: 9043 - protein, 19 aa, synthetic construct
  REGION 1..19: note = Description of Artificial Sequence: Synthetic peptide
VAVIWYDGSDKYYADSVRG

SEQ ID NO: 9044 - protein, 12 aa, synthetic construct
  REGION 1..12: note = Description of Artificial Sequence: Synthetic peptide
DILTGNPRDFDY

SEQ ID NO: 9045 - protein, 8 aa, synthetic construct
  REGION 1..8: note = Description of Artificial Sequence: Synthetic peptide
GFSLTNYG

SEQ ID NO: 9046 - protein, 7 aa, synthetic construct
  REGION 1..7: note = Description of Artificial Sequence: Synthetic peptide
IWSGGNT

SEQ ID NO: 9047 - protein, 13 aa, synthetic construct
  REGION 1..13: note = Description of Artificial Sequence: Synthetic peptide
ARALTYYDYEFAY

SEQ ID NO: 9048 - protein, 5 aa, synthetic construct
  REGION 1..5: note = Description of Artificial Sequence: Synthetic peptide
DYKIH

SEQ ID NO: 9049 - protein, 17 aa, synthetic construct
  REGION 1..17: note = Description of Artificial Sequence: Synthetic peptide
YFNPNSGYSTYAQKFQG

SEQ ID NO: 9050 - protein, 11 aa, synthetic construct
  REGION 1..11: note = Description of Artificial Sequence: Synthetic peptide
LSPGGYYVMDA

SEQ ID NO: 9051 - protein, 5 aa, synthetic construct
  REGION 1..5: note = Description of Artificial Sequence: Synthetic peptide
TYGMH

SEQ ID NO: 9052 - protein, 17 aa, synthetic construct
  REGION 1..17: note = Description of Artificial Sequence: Synthetic peptide
VIWDDGSYKYYGDSVKG

SEQ ID NO: 9053 - protein, 16 aa, synthetic construct
  REGION 1..16: note = Description of Artificial Sequence: Synthetic peptide
DGITMVRGVMKDYFDY

SEQ ID NO: 9054 - protein, 7 aa, synthetic construct
  REGION 1..7: note = Description of Artificial Sequence: Synthetic peptide
SGDYYWS

SEQ ID NO: 9055 - protein, 16 aa, synthetic construct
  REGION 1..16: note = Description of Artificial Sequence: Synthetic peptide
YIYYSGSTDYNPSLKS

SEQ ID NO: 9056 - protein, 11 aa, synthetic construct
  REGION 1..11: note = Description of Artificial Sequence: Synthetic peptide
VSIFGVGTFDY

SEQ ID NO: 9057 - protein, 5 aa, synthetic construct
  REGION 1..5: note = Description of Artificial Sequence: Synthetic peptide
SYAIS

SEQ ID NO: 9058 - protein, 17 aa, synthetic construct
  REGION 1..17: note = Description of Artificial Sequence: Synthetic peptide
SIIPIFGTVNYAQKFQG

SEQ ID NO: 9059 - protein, 12 aa, synthetic construct
  REGION 1..12: note = Description of Artificial Sequence: Synthetic peptide
DPSVNLYWYFDL

SEQ ID NO: 9060 - protein, 17 aa, synthetic construct
  REGION 1..17: note = Description of Artificial Sequence: Synthetic peptide
SIIPIFGAANPAQKSQG

SEQ ID NO: 9061 - protein, 10 aa, synthetic construct
  REGION 1..10: note = Description of Artificial Sequence: Synthetic peptide
MGRGKVAFDI

SEQ ID NO: 9062 - protein, 5 aa, synthetic construct
  REGION 1..5: note = Description of Artificial Sequence: Synthetic peptide
SYGIN

SEQ ID NO: 9063 - protein, 17 aa, synthetic construct
  REGION 1..17: note = Description of Artificial Sequence: Synthetic peptide
WISAYNGNTYYAQKLRG

SEQ ID NO: 9064 - protein, 14 aa, synthetic construct
  REGION 1..14: note = Description of Artificial Sequence: Synthetic peptide
DLGGYGSGSVPFDP

SEQ ID NO: 9065 - protein, 5 aa, synthetic construct
  REGION 1..5: note = Description of Artificial Sequence: Synthetic peptide
NYYIY

SEQ ID NO: 9066 - protein, 17 aa, synthetic construct
  REGION 1..17: note = Description of Artificial Sequence: Synthetic peptide
GINPTSGGSNFNEKFKT

SEQ ID NO: 9067 - protein, 14 aa, synthetic construct
  REGION 1..14: note = Description of Artificial Sequence: Synthetic peptide
QGLWFDSDGRGFDF

SEQ ID NO: 9068 - protein, 10 aa, synthetic construct
  REGION 1..10: note = Description of Artificial Sequence: Synthetic peptide
GGSVSSGDYY

SEQ ID NO: 9069 - protein, 7 aa, synthetic construct
  REGION 1..7: note = Description of Artificial Sequence: Synthetic peptide
IYYSGNT

SEQ ID NO: 9070 - protein, 11 aa, synthetic construct
  REGION 1..11: note = Description of Artificial Sequence: Synthetic peptide
VRDRVTGAFDI

SEQ ID NO: 9071 - protein, 8 aa, synthetic construct
  REGION 1..8: note = Description of Artificial Sequence: Synthetic peptide
GYTFTEYP

SEQ ID NO: 9072 - protein, 8 aa, synthetic construct
  REGION 1..8: note = Description of Artificial Sequence: Synthetic peptide
IYTDIGKP

SEQ ID NO: 9073 - protein, 11 aa, synthetic construct
  REGION 1..11: note = Description of Artificial Sequence: Synthetic peptide
VRDRYDSLFDY

SEQ ID NO: 9074 - protein, 5 aa, synthetic construct
  REGION 1..5: note = Description of Artificial Sequence: Synthetic peptide
HYDMS

SEQ ID NO: 9075 - protein, 17 aa, synthetic construct
  REGION 1..17: note = Description of Artificial Sequence: Synthetic peptide
YIASGGDITYYADTVKG

SEQ ID NO: 9076 - protein, 12 aa, synthetic construct
  REGION 1..12: note = Description of Artificial Sequence: Synthetic peptide
SSYGNNGDALDF

SEQ ID NO: 9077 - protein, 5 aa, synthetic construct
  REGION 1..5: note = Description of Artificial Sequence: Synthetic peptide
SYAMG

SEQ ID NO: 9078 - protein, 17 aa, synthetic construct
  REGION 1..17: note = Description of Artificial Sequence: Synthetic peptide
SISGSSRYIYYADSVKG

SEQ ID NO: 9079 - protein, 10 aa, synthetic construct
  REGION 1..10: note = Description of Artificial Sequence: Synthetic peptide
MDASGSYFNF

SEQ ID NO: 9080 - protein, 5 aa, synthetic construct
  REGION 1..5: note = Description of Artificial Sequence: Synthetic peptide
SYWIG

SEQ ID NO: 9081 - protein, 6 aa, synthetic construct
  REGION 1..6: note = Description of Artificial Sequence: Synthetic peptide
WRDSPL

SEQ ID NO: 9082 - protein, 8 aa, synthetic construct
  REGION 1..8: note = Description of Artificial Sequence: Synthetic peptide
GFNIKDTY

SEQ ID NO: 9083 - protein, 8 aa, synthetic construct
  REGION 1..8: note = Description of Artificial Sequence: Synthetic peptide
IYPTNGYT

SEQ ID NO: 9084 - protein, 13 aa, synthetic construct
  REGION 1..13: note = Description of Artificial Sequence: Synthetic peptide
SRWGGDGFYAMDY

SEQ ID NO: 9085 - protein, 5 aa, synthetic construct
  REGION 1..5: note = Description of Artificial Sequence: Synthetic peptide
SYAMS

SEQ ID NO: 9086 - protein, 17 aa, synthetic construct
  REGION 1..17: note = Description of Artificial Sequence: Synthetic peptide
AISGRGDNTYYADSVKG

SEQ ID NO: 9087 - protein, 12 aa, synthetic construct
  REGION 1..12: note = Description of Artificial Sequence: Synthetic peptide
AKMTSNAFAFDY

SEQ ID NO: 9088 - protein, 8 aa, synthetic construct
  REGION 1..8: note = Description of Artificial Sequence: Synthetic peptide
GFTFTDYT

SEQ ID NO: 9089 - protein, 8 aa, synthetic construct
  REGION 1..8: note = Description of Artificial Sequence: Synthetic peptide
VNPNSGGS

SEQ ID NO: 9090 - protein, 12 aa, synthetic construct
  REGION 1..12: note = Description of Artificial Sequence: Synthetic peptide
ARNLGPSFYFDY

SEQ ID NO: 9091 - protein, 5 aa, synthetic construct
  REGION 1..5: note = Description of Artificial Sequence: Synthetic peptide
HYVMA

SEQ ID NO: 9092 - protein, 17 aa, synthetic construct
  REGION 1..17: note = Description of Artificial Sequence: Synthetic peptide
SISSSGGWTLYADSVKG

SEQ ID NO: 9093 - protein, 10 aa, synthetic construct
  REGION 1..10: note = Description of Artificial Sequence: Synthetic peptide
GLKMATIFDY

SEQ ID NO: 9094 - protein, 5 aa, synthetic construct
  REGION 1..5: note = Description of Artificial Sequence: Synthetic peptide
GDWIH

SEQ ID NO: 9095 - protein, 17 aa, synthetic construct
  REGION 1..17: note = Description of Artificial Sequence: Synthetic peptide
EISAAGGYTDYADSVKG

SEQ ID NO: 9096 - protein, 12 aa, synthetic construct
  REGION 1..12: note = Description of Artificial Sequence: Synthetic peptide
ESRVSFEAAMDY

SEQ ID NO: 9097 - protein, 5 aa, synthetic construct
  REGION 1..5: note = Description of Artificial Sequence: Synthetic peptide
SYWMS

SEQ ID NO: 9098 - protein, 17 aa, synthetic construct
  REGION 1..17: note = Description of Artificial Sequence: Synthetic peptide
NINRDGSASYYVDSVKG

SEQ ID NO: 9099 - protein, 9 aa, synthetic construct
  REGION 1..9: note = Description of Artificial Sequence: Synthetic peptide
DRGVGYFDL

SEQ ID NO: 9100 - protein, 17 aa, synthetic construct
  REGION 1..17: note = Description of Artificial Sequence: Synthetic peptide
LIYPGDSDTKYSPSFQG

SEQ ID NO: 9101 - protein, 20 aa, synthetic construct
  REGION 1..20: note = Description of Artificial Sequence: Synthetic peptide
HDVGYCTDRTCAKWPEWLGV

SEQ ID NO: 9102 - protein, 5 aa, synthetic construct
  REGION 1..5: note = Description of Artificial Sequence: Synthetic peptide
DYYMY

SEQ ID NO: 9103 - protein, 17 aa, synthetic construct
  REGION 1..17: note = Description of Artificial Sequence: Synthetic peptide
YMSNVGAITDYPDTVKG

SEQ ID NO: 9104 - protein, 10 aa, synthetic construct
  REGION 1..10: note = Description of Artificial Sequence: Synthetic peptide
GTRDGSWFAY

SEQ ID NO: 9105 - protein, 8 aa, synthetic construct
  REGION 1..8: note = Description of Artificial Sequence: Synthetic peptide
GYSFTSYW

SEQ ID NO: 9106 - protein, 8 aa, synthetic construct
  REGION 1..8: note = Description of Artificial Sequence: Synthetic peptide
IDPGDSRT

SEQ ID NO: 9107 - protein, 13 aa, synthetic construct
  REGION 1..13: note = Description of Artificial Sequence: Synthetic peptide
ARGQLYGGTYMDG

SEQ ID NO: 9108 - protein, 5 aa, synthetic construct
  REGION 1..5: note = Description of Artificial Sequence: Synthetic peptide
IYGMH

SEQ ID NO: 9109 - protein, 17 aa, synthetic construct
  REGION 1..17: note = Description of Artificial Sequence: Synthetic peptide
VIWYDGSHEYYADSVKG

SEQ ID NO: 9110 - protein, 13 aa, synthetic construct
  REGION 1..13: note = Description of Artificial Sequence: Synthetic peptide
DGDYYDSGSPLDY

SEQ ID NO: 9111 - protein, 5 aa, synthetic construct
  REGION 1..5: note = Description of Artificial Sequence: Synthetic peptide
RIYGM

SEQ ID NO: 9112 - protein, 17 aa, synthetic construct
  REGION 1..17: note = Description of Artificial Sequence: Synthetic peptide
VLWYDGSHEYYADSVKG

SEQ ID NO: 9113 - protein, 5 aa, synthetic construct
  REGION 1..5: note = Description of Artificial Sequence: Synthetic peptide
RYWMS

SEQ ID NO: 9114 - protein, 17 aa, synthetic construct
  REGION 1..17: note = Description of Artificial Sequence: Synthetic peptide
SIKQAGSEKTYVDSVKG

SEQ ID NO: 9115 - protein, 22 aa, synthetic construct
  REGION 1..22: note = Description of Artificial Sequence: Synthetic peptide
EGAYYYDSASYYPYYYYYSMDV

SEQ ID NO: 9116 - protein, 5 aa, synthetic construct
  REGION 1..5: note = Description of Artificial Sequence: Synthetic peptide
GYTMN

SEQ ID NO: 9117 - protein, 17 aa, synthetic construct
  REGION 1..17: note = Description of Artificial Sequence: Synthetic peptide
LITPYNGASSYNQKFRG

SEQ ID NO: 9118 - protein, 10 aa, synthetic construct
  REGION 1..10: note = Description of Artificial Sequence: Synthetic peptide
GGYDGRGFDY

SEQ ID NO: 9119 - protein, 5 aa, synthetic construct
  REGION 1..5: note = Description of Artificial Sequence: Synthetic peptide
SYVLH

SEQ ID NO: 9120 - protein, 17 aa, synthetic construct
  REGION 1..17: note = Description of Artificial Sequence: Synthetic peptide
YINPYNDGTQYNEKFKG

SEQ ID NO: 9121 - protein, 10 aa, synthetic construct
  REGION 1..10: note = Description of Artificial Sequence: Synthetic peptide
GFGGSYGFAY

SEQ ID NO: 9122 - protein, 17 aa, synthetic construct
  REGION 1..17: note = Description of Artificial Sequence: Synthetic peptide
YINPYNDGTQTNKKFKG

SEQ ID NO: 9123 - protein, 17 aa, synthetic construct
  REGION 1..17: note = Description of Artificial Sequence: Synthetic peptide
YIYPGNGATNYNQKFQG

SEQ ID NO: 9124 - protein, 8 aa, synthetic construct
  REGION 1..8: note = Description of Artificial Sequence: Synthetic peptide
GDSVPFAY

SEQ ID NO: 9125 - protein, 5 aa, synthetic construct
  REGION 1..5: note = Description of Artificial Sequence: Synthetic peptide
AYWIE

SEQ ID NO: 9126 - protein, 17 aa, synthetic construct
  REGION 1..17: note = Description of Artificial Sequence: Synthetic peptide
EILPGSNNSRYNEKFKG

SEQ ID NO: 9127 - protein, 9 aa, synthetic construct
  REGION 1..9: note = Description of Artificial Sequence: Synthetic peptide
SYDFAWFAY

SEQ ID NO: 9128 - protein, 5 aa, synthetic construct
  REGION 1..5: note = Description of Artificial Sequence: Synthetic peptide
TYAIS

SEQ ID NO: 9129 - protein, 17 aa, synthetic construct
  REGION 1..17: note = Description of Artificial Sequence: Synthetic peptide
GIIPIFGKAHYAQKFQG

SEQ ID NO: 9130 - protein, 14 aa, synthetic construct
  REGION 1..14: note = Description of Artificial Sequence: Synthetic peptide
KFHFVSGSPFGMDV

SEQ ID NO: 9131 - protein, 8 aa, synthetic construct
  REGION 1..8: note = Description of Artificial Sequence: Synthetic peptide
GFTFSRYW

SEQ ID NO: 9132 - protein, 8 aa, synthetic construct
  REGION 1..8: note = Description of Artificial Sequence: Synthetic peptide
IKQDGSEK

SEQ ID NO: 9133 - protein, 14 aa, synthetic construct
  REGION 1..14: note = Description of Artificial Sequence: Synthetic peptide
AREGGWFGELAFDY

SEQ ID NO: 9134 - protein, 8 aa, synthetic construct
  REGION 1..8: note = Description of Artificial Sequence: Synthetic peptide
GFTFSDSW

SEQ ID NO: 9135 - protein, 8 aa, synthetic construct
  REGION 1..8: note = Description of Artificial Sequence: Synthetic peptide
ISPYGGST

SEQ ID NO: 9136 - protein, 11 aa, synthetic construct
  REGION 1..11: note = Description of Artificial Sequence: Synthetic peptide
ARRHWPGGFDY

SEQ ID NO: 9137 - protein, 8 aa, synthetic construct
  REGION 1..8: note = Description of Artificial Sequence: Synthetic peptide
GFTFSSYI

SEQ ID NO: 9138 - protein, 8 aa, synthetic construct
  REGION 1..8: note = Description of Artificial Sequence: Synthetic peptide
IYPSGGIT

SEQ ID NO: 9139 - protein, 13 aa, synthetic construct
  REGION 1..13: note = Description of Artificial Sequence: Synthetic peptide
ARIKLGTVTTVDY

SEQ ID NO: 9140 - protein, 10 aa, synthetic construct
  REGION 1..10: note = Description of Artificial Sequence: Synthetic peptide
GYTFTEYTIH

SEQ ID NO: 9141 - protein, 17 aa, synthetic construct
  REGION 1..17: note = Description of Artificial Sequence: Synthetic peptide
NINPNNGGTTYNQKFED

SEQ ID NO: 9142 - protein, 6 aa, synthetic construct
  REGION 1..6: note = Description of Artificial Sequence: Synthetic peptide
GWNFDY

SEQ ID NO: 9143 - protein, 8 aa, synthetic construct
  REGION 1..8: note = Description of Artificial Sequence: Synthetic peptide
GFTFSDYY

SEQ ID NO: 9144 - protein, 8 aa, synthetic construct
  REGION 1..8: note = Description of Artificial Sequence: Synthetic peptide
ISDGGYYT

SEQ ID NO: 9145 - protein, 14 aa, synthetic construct
  REGION 1..14: note = Description of Artificial Sequence: Synthetic peptide
ARGFPLLRHGAMDY

SEQ ID NO: 9146 - protein, 5 aa, synthetic construct
  REGION 1..5: note = Description of Artificial Sequence: Synthetic peptide
AYYMS

SEQ ID NO: 9147 - protein, 17 aa, synthetic construct
  REGION 1..17: note = Description of Artificial Sequence: Synthetic peptide
TIYPSSGKTYYATWVNG

SEQ ID NO: 9148 - protein, 12 aa, synthetic construct
  REGION 1..12: note = Description of Artificial Sequence: Synthetic peptide
DSYADDGALFNI

SEQ ID NO: 9149 - protein, 16 aa, synthetic construct
  REGION 1..16: note = Description of Artificial Sequence: Synthetic peptide
SISRGGTTYYPDSVKG

SEQ ID NO: 9150 - protein, 11 aa, synthetic construct
  REGION 1..11: note = Description of Artificial Sequence: Synthetic peptide
YDYDGYYAMDY

SEQ ID NO: 9151 - protein, 5 aa, synthetic construct
  REGION 1..5: note = Description of Artificial Sequence: Synthetic peptide
SHWMS

SEQ ID NO: 9152 - protein, 16 aa, synthetic construct
  REGION 1..16: note = Description of Artificial Sequence: Synthetic peptide
IIAASGSTYYANWAKG

SEQ ID NO: 9153 - protein, 12 aa, synthetic construct
  REGION 1..12: note = Description of Artificial Sequence: Synthetic peptide
DYGDYRLVTFNI

SEQ ID NO: 9154 - protein, 5 aa, synthetic construct
  REGION 1..5: note = Description of Artificial Sequence: Synthetic peptide
DYPIS

SEQ ID NO: 9155 - protein, 16 aa, synthetic construct
  REGION 1..16: note = Description of Artificial Sequence: Synthetic peptide
FINSGGSTWYASWVKG

SEQ ID NO: 9156 - protein, 11 aa, synthetic construct
  REGION 1..11: note = Description of Artificial Sequence: Synthetic peptide
GYSTYYCDFNI

SEQ ID NO: 9157 - protein, 5 aa, synthetic construct
  REGION 1..5: note = Description of Artificial Sequence: Synthetic peptide
DHAIH

SEQ ID NO: 9158 - protein, 17 aa, synthetic construct
  REGION 1..17: note = Description of Artificial Sequence: Synthetic peptide
YFSPGNDDFKYNERFKG

SEQ ID NO: 9159 - protein, 10 aa, synthetic construct
  REGION 1..10: note = Description of Artificial Sequence: Synthetic peptide
GYTFTNFGMN

SEQ ID NO: 9160 - protein, 17 aa, synthetic construct
  REGION 1..17: note = Description of Artificial Sequence: Synthetic peptide
WINTNTGEPRYAEEFKG

SEQ ID NO: 9161 - protein, 10 aa, synthetic construct
  REGION 1..10: note = Description of Artificial Sequence: Synthetic peptide
DWDGAYFFDY

SEQ ID NO: 9162 - protein, 10 aa, synthetic construct
  REGION 1..10: note = Description of Artificial Sequence: Synthetic peptide
GYTFTDYVIS

SEQ ID NO: 9163 - protein, 17 aa, synthetic construct
  REGION 1..17: note = Description of Artificial Sequence: Synthetic peptide
EIYPGSNSIYYNEKFKG

SEQ ID NO: 9164 - protein, 8 aa, synthetic construct
  REGION 1..8: note = Description of Artificial Sequence: Synthetic peptide
GGNYGFDY

SEQ ID NO: 9165 - protein, 19 aa, synthetic construct
  REGION 1..19: note = Description of Artificial Sequence: Synthetic peptide
RIRSKSNNYATYYADSVKD

SEQ ID NO: 9166 - protein, 11 aa, synthetic construct
  REGION 1..11: note = Description of Artificial Sequence: Synthetic peptide
QWDYDVRAMNY

SEQ ID NO: 9167 - protein, 17 aa, synthetic construct
  REGION 1..17: note = Description of Artificial Sequence: Synthetic peptide
WINTYTGEPTYTDDFKG

SEQ ID NO: 9168 - protein, 12 aa, synthetic construct
  REGION 1..12: note = Description of Artificial Sequence: Synthetic peptide
GGFGSSYWYFDV

SEQ ID NO: 9169 - protein, 11 aa, synthetic construct
  REGION 1..11: note = Description of Artificial Sequence: Synthetic peptide
GFAFSSYGMHW

SEQ ID NO: 9170 - protein, 17 aa, synthetic construct
  REGION 1..17: note = Description of Artificial Sequence: Synthetic peptide
VIWYDGSNKYYADSVRG

SEQ ID NO: 9171 - protein, 17 aa, synthetic construct
  REGION 1..17: note = Description of Artificial Sequence: Synthetic peptide
DHYGSGVHHYFYYGLDV

SEQ ID NO: 9172 - protein, 10 aa, synthetic construct
  REGION 1..10: note = Description of Artificial Sequence: Synthetic peptide
GFTFSSYSMN

SEQ ID NO: 9173 - protein, 17 aa, synthetic construct
  REGION 1..17: note = Description of Artificial Sequence: Synthetic peptide
SISSSSSYIYYADSVKG

SEQ ID NO: 9174 - protein, 7 aa, synthetic construct
  REGION 1..7: note = Description of Artificial Sequence: Synthetic peptide
VTDAFDI

SEQ ID NO: 9175 - protein, 8 aa, synthetic construct
  REGION 1..8: note = Description of Artificial Sequence: Synthetic peptide
GFTFSSYG

SEQ ID NO: 9176 - protein, 8 aa, synthetic construct
  REGION 1..8: note = Description of Artificial Sequence: Synthetic peptide
ITSGGSYT

SEQ ID NO: 9177 - protein, 10 aa, synthetic construct
  REGION 1..10: note = Description of Artificial Sequence: Synthetic peptide
VRIGEDALDY

SEQ ID NO: 9178 - protein, 11 aa, synthetic construct
  REGION 1..11: note = Description of Artificial Sequence: Synthetic peptide
KTSQDINKYMA

SEQ ID NO: 9179 - protein, 6 aa, synthetic construct
  REGION 1..6: note = Description of Artificial Sequence: Synthetic peptide
YTSALQ

SEQ ID NO: 9180 - protein, 8 aa, synthetic construct
  REGION 1..8: note = Description of Artificial Sequence: Synthetic peptide
LQYDNLWT

SEQ ID NO: 9181 - protein, 10 aa, synthetic construct
  REGION 1..10: note = Description of Artificial Sequence: Synthetic peptide
SQSVSSTYLA

SEQ ID NO: 9182 - protein, 7 aa, synthetic construct
  REGION 1..7: note = Description of Artificial Sequence: Synthetic peptide
GASSRAT

SEQ ID NO: 9183 - protein, 7 aa, synthetic construct
  REGION 1..7: note = Description of Artificial Sequence: Synthetic peptide
QHYDNSQ

SEQ ID NO: 9184 - protein, 5 aa, synthetic construct
  REGION 1..5: note = Description of Artificial Sequence: Synthetic peptide
SSSVS

SEQ ID NO: 9185 - skipped

SEQ ID NO: 9186 - protein, 6 aa, synthetic construct
  REGION 1..6: note = Description of Artificial Sequence: Synthetic peptide
RSSYPL

SEQ ID NO: 9187 - protein, 15 aa, synthetic construct
  REGION 1..15: note = Description of Artificial Sequence: Synthetic peptide
RAGESVDIFGVGFLH

SEQ ID NO: 9188 - protein, 7 aa, synthetic construct
  REGION 1..7: note = Description of Artificial Sequence: Synthetic peptide
RASNLES

SEQ ID NO: 9189 - protein, 9 aa, synthetic construct
  REGION 1..9: note = Description of Artificial Sequence: Synthetic peptide
QQTNEDPYT

SEQ ID NO: 9190 - protein, 11 aa, synthetic construct
  REGION 1..11: note = Description of Artificial Sequence: Synthetic peptide
KASQDVGTSVA

SEQ ID NO: 9191 - protein, 7 aa, synthetic construct
  REGION 1..7: note = Description of Artificial Sequence: Synthetic peptide
WTSTRHT

SEQ ID NO: 9192 - protein, 8 aa, synthetic construct
  REGION 1..8: note = Description of Artificial Sequence: Synthetic peptide
QQYSLYRS

SEQ ID NO: 9193 - protein, 11 aa, synthetic construct
  REGION 1..11: note = Description of Artificial Sequence: Synthetic peptide
RASSSVTYIHW

SEQ ID NO: 9194 - protein, 7 aa, synthetic construct
  REGION 1..7: note = Description of Artificial Sequence: Synthetic peptide
TSNLASG

SEQ ID NO: 9195 - protein, 9 aa, synthetic construct
  REGION 1..9: note = Description of Artificial Sequence: Synthetic peptide
QHWSSKPPT

SEQ ID NO: 9196 - protein, 14 aa, synthetic construct
  REGION 1..14: note = Description of Artificial Sequence: Synthetic peptide
TLRRGINVGAYSIY

SEQ ID NO: 9197 - protein, 11 aa, synthetic construct
  REGION 1..11: note = Description of Artificial Sequence: Synthetic peptide
YKSDSDKQQGS

SEQ ID NO: 9198 - protein, 10 aa, synthetic construct
  REGION 1..10: note = Description of Artificial Sequence: Synthetic peptide
MIWHSGASAV

SEQ ID NO: 9199 - protein, 13 aa, synthetic construct
  REGION 1..13: note = Description of Artificial Sequence: Synthetic peptide
KASQSVDYDGDSY

SEQ ID NO: 9200 - protein, 8 aa, synthetic construct
  REGION 1..8: note = Description of Artificial Sequence: Synthetic peptide
YDASNLVS

SEQ ID NO: 9201 - protein, 9 aa, synthetic construct
  REGION 1..9: note = Description of Artificial Sequence: Synthetic peptide
QQSTEDPWT

SEQ ID NO: 9202 - protein, 11 aa, synthetic construct
  REGION 1..11: note = Description of Artificial Sequence: Synthetic peptide
RASQSVSSYLA

SEQ ID NO: 9203 - protein, 7 aa, synthetic construct
  REGION 1..7: note = Description of Artificial Sequence: Synthetic peptide
DASNRAT

SEQ ID NO: 9204 - protein, 9 aa, synthetic construct
  REGION 1..9: note = Description of Artificial Sequence: Synthetic peptide
QQRSNWPIT

SEQ ID NO: 9205 - protein, 11 aa, synthetic construct
  REGION 1..11: note = Description of Artificial Sequence: Synthetic peptide
RASSSVSYMHW

SEQ ID NO: 9206 - protein, 7 aa, synthetic construct
  REGION 1..7: note = Description of Artificial Sequence: Synthetic peptide
APSNLAS

SEQ ID NO: 9207 - protein, 9 aa, synthetic construct
  REGION 1..9: note = Description of Artificial Sequence: Synthetic peptide
QQWSFNPPT

SEQ ID NO: 9208 - protein, 16 aa, synthetic construct
  REGION 1..16: note = Description of Artificial Sequence: Synthetic peptide
RSSKSLLHSNGITYLY

SEQ ID NO: 9209 - protein, 7 aa, synthetic construct
  REGION 1..7: note = Description of Artificial Sequence: Synthetic peptide
QMSNLVS

SEQ ID NO: 9210 - protein, 9 aa, synthetic construct
  REGION 1..9: note = Description of Artificial Sequence: Synthetic peptide
AQNLELPYT

SEQ ID NO: 9211 - protein, 5 aa, synthetic construct
  REGION 1..5: note = Description of Artificial Sequence: Synthetic peptide
SSVSY

SEQ ID NO: 9212 - skipped

SEQ ID NO: 9213 - protein, 9 aa, synthetic construct
  REGION 1..9: note = Description of Artificial Sequence: Synthetic peptide
QQWTSNPPT

SEQ ID NO: 9214 - protein, 15 aa, synthetic construct
  REGION 1..15: note = Description of Artificial Sequence: Synthetic peptide
RASESLDNYGIRFLT

SEQ ID NO: 9215 - protein, 7 aa, synthetic construct
  REGION 1..7: note = Description of Artificial Sequence: Synthetic peptide
AASNQGS

SEQ ID NO: 9216 - protein, 9 aa, synthetic construct
  REGION 1..9: note = Description of Artificial Sequence: Synthetic peptide
QQTKEVPWS

SEQ ID NO: 9217 - protein, 6 aa, synthetic construct
  REGION 1..6: note = Description of Artificial Sequence: Synthetic peptide
QSVSSY

SEQ ID NO: 9218 - skipped

SEQ ID NO: 9219 - protein, 9 aa, synthetic construct
  REGION 1..9: note = Description of Artificial Sequence: Synthetic peptide
QQRSNWPPT

SEQ ID NO: 9220 - protein, 15 aa, synthetic construct
  REGION 1..15: note = Description of Artificial Sequence: Synthetic peptide
RASKSVSTSGYSFMH

SEQ ID NO: 9221 - protein, 7 aa, synthetic construct
  REGION 1..7: note = Description of Artificial Sequence: Synthetic peptide
LASNLES

SEQ ID NO: 9222 - protein, 9 aa, synthetic construct
  REGION 1..9: note = Description of Artificial Sequence: Synthetic peptide
QHSREVPWT

SEQ ID NO: 9223 - protein, 7 aa, synthetic construct
  REGION 1..7: note = Description of Artificial Sequence: Synthetic peptide
LASDLPS

SEQ ID NO: 9224 - protein, 9 aa, synthetic construct
  REGION 1..9: note = Description of Artificial Sequence: Synthetic peptide
QHSREIPYT

SEQ ID NO: 9225 - protein, 7 aa, synthetic construct
  REGION 1..7: note = Description of Artificial Sequence: Synthetic peptide
YDASNRA

SEQ ID NO: 9226 - protein, 9 aa, synthetic construct
  REGION 1..9: note = Description of Artificial Sequence: Synthetic peptide
QQRTNWPLT

SEQ ID NO: 9227 - protein, 11 aa, synthetic construct
  REGION 1..11: note = Description of Artificial Sequence: Synthetic peptide
RASQGISSALA

SEQ ID NO: 9228 - protein, 7 aa, synthetic construct
  REGION 1..7: note = Description of Artificial Sequence: Synthetic peptide
DASSLES

SEQ ID NO: 9229 - protein, 9 aa, synthetic construct
  REGION 1..9: note = Description of Artificial Sequence: Synthetic peptide
QQFNSYPFT

SEQ ID NO: 9230 - protein, 11 aa, synthetic construct
  REGION 1..11: note = Description of Artificial Sequence: Synthetic peptide
RASQGISSWLA

SEQ ID NO: 9231 - protein, 7 aa, synthetic construct
  REGION 1..7: note = Description of Artificial Sequence: Synthetic peptide
AASSLQS

SEQ ID NO: 9232 - protein, 9 aa, synthetic construct
  REGION 1..9: note = Description of Artificial Sequence: Synthetic peptide
QQYNSYPLT

SEQ ID NO: 9233 - protein, 9 aa, synthetic construct
  REGION 1..9: note = Description of Artificial Sequence: Synthetic peptide
QQRSNWPLT

SEQ ID NO: 9234 - protein, 11 aa, synthetic construct
  REGION 1..11: note = Description of Artificial Sequence: Synthetic peptide
RASQGINTWLA

SEQ ID NO: 9235 - protein, 7 aa, synthetic construct
  REGION 1..7: note = Description of Artificial Sequence: Synthetic peptide
AASSLKS

SEQ ID NO: 9236 - protein, 9 aa, synthetic construct
  REGION 1..9: note = Description of Artificial Sequence: Synthetic peptide
QQANSFPLT

SEQ ID NO: 9237 - protein, 7 aa, synthetic construct
  REGION 1..7: note = Description of Artificial Sequence: Synthetic peptide
SSVSSIY

SEQ ID NO: 9238 - skipped

SEQ ID NO: 9239 - protein, 9 aa, synthetic construct
  REGION 1..9: note = Description of Artificial Sequence: Synthetic peptide
QVYSGYPLT

SEQ ID NO: 9240 - protein, 17 aa, synthetic construct
  REGION 1..17: note = Description of Artificial Sequence: Synthetic peptide
KSSQSLLYTSSQKNYLA

SEQ ID NO: 9241 - protein, 7 aa, synthetic construct
  REGION 1..7: note = Description of Artificial Sequence: Synthetic peptide
WASTRES

SEQ ID NO: 9242 - protein, 9 aa, synthetic construct
  REGION 1..9: note = Description of Artificial Sequence: Synthetic peptide
QQYYAYPWT

SEQ ID NO: 9243 - protein, 11 aa, synthetic construct
  REGION 1..11: note = Description of Artificial Sequence: Synthetic peptide
RASQSINSYLD

SEQ ID NO: 9244 - protein, 9 aa, synthetic construct
  REGION 1..9: note = Description of Artificial Sequence: Synthetic peptide
QQYYSTPFT

SEQ ID NO: 9245 - protein, 12 aa, synthetic construct
  REGION 1..12: note = Description of Artificial Sequence: Synthetic peptide
RASQSVGSSYLA

SEQ ID NO: 9246 - protein, 7 aa, synthetic construct
  REGION 1..7: note = Description of Artificial Sequence: Synthetic peptide
GAFSRAT

SEQ ID NO: 9247 - protein, 9 aa, synthetic construct
  REGION 1..9: note = Description of Artificial Sequence: Synthetic peptide
QQYGSSPWT

SEQ ID NO: 9248 - protein, 11 aa, synthetic construct
  REGION 1..11: note = Description of Artificial Sequence: Synthetic peptide
RASQSIGISLH

SEQ ID NO: 9249 - protein, 7 aa, synthetic construct
  REGION 1..7: note = Description of Artificial Sequence: Synthetic peptide
YASQSFS

SEQ ID NO: 9250 - protein, 9 aa, synthetic construct
  REGION 1..9: note = Description of Artificial Sequence: Synthetic peptide
HQSRSFPWT

SEQ ID NO: 9251 - protein, 17 aa, synthetic construct
  REGION 1..17: note = Description of Artificial Sequence: Synthetic peptide
KSSQSLLNSGNQKNYLT

SEQ ID NO: 9252 - protein, 9 aa, synthetic construct
  REGION 1..9: note = Description of Artificial Sequence: Synthetic peptide
QNDYSYPLT

SEQ ID NO: 9253 - protein, 11 aa, synthetic construct
  REGION 1..11: note = Description of Artificial Sequence: Synthetic peptide
RTSQSISSYLN

SEQ ID NO: 9254 - protein, 9 aa, synthetic construct
  REGION 1..9: note = Description of Artificial Sequence: Synthetic peptide
QQSYDIPYT

SEQ ID NO: 9255 - protein, 6 aa, synthetic construct
  REGION 1..6: note = Description of Artificial Sequence: Synthetic peptide
ENVVTY

SEQ ID NO: 9256 - skipped

SEQ ID NO: 9257 - protein, 9 aa, synthetic construct
  REGION 1..9: note = Description of Artificial Sequence: Synthetic peptide
GQGYSYPYT

SEQ ID NO: 9258 - protein, 7 aa, synthetic construct
  REGION 1..7: note = Description of Artificial Sequence: Synthetic peptide
SASSSVS

SEQ ID NO: 9259 - protein, 7 aa, synthetic construct
  REGION 1..7: note = Description of Artificial Sequence: Synthetic peptide
DTSNLAS

SEQ ID NO: 9260 - protein, 9 aa, synthetic construct
  REGION 1..9: note = Description of Artificial Sequence: Synthetic peptide
HQRSGYPYT

SEQ ID NO: 9261 - protein, 17 aa, synthetic construct
  REGION 1..17: note = Description of Artificial Sequence: Synthetic peptide
KSSQSVLYSSNNKNYLA

SEQ ID NO: 9262 - protein, 9 aa, synthetic construct
  REGION 1..9: note = Description of Artificial Sequence: Synthetic peptide
QQYYSYPLT

SEQ ID NO: 9263 - protein, 14 aa, synthetic construct
  REGION 1..14: note = Description of Artificial Sequence: Synthetic peptide
RSSINKKGSNGITY

SEQ ID NO: 9264 - protein, 5 aa, synthetic construct
  REGION 1..5: note = Description of Artificial Sequence: Synthetic peptide
SGSGS

SEQ ID NO: 9265 - protein, 9 aa, synthetic construct
  REGION 1..9: note = Description of Artificial Sequence: Synthetic peptide
AQNLEIPRT

SEQ ID NO: 9266 - protein, 16 aa, synthetic construct
  REGION 1..16: note = Description of Artificial Sequence: Synthetic peptide
RSTKSLLHSNGITYLY

SEQ ID NO: 9267 - protein, 7 aa, synthetic construct
  REGION 1..7: note = Description of Artificial Sequence: Synthetic peptide
QMSNLAS

SEQ ID NO: 9268 - protein, 11 aa, synthetic construct
  REGION 1..11: note = Description of Artificial Sequence: Synthetic peptide
RASQSISTWLA

SEQ ID NO: 9269 - protein, 7 aa, synthetic construct
  REGION 1..7: note = Description of Artificial Sequence: Synthetic peptide
KASNLHT

SEQ ID NO: 9270 - protein, 9 aa, synthetic construct
  REGION 1..9: note = Description of Artificial Sequence: Synthetic peptide
QQYNSYSRT

SEQ ID NO: 9271 - protein, 7 aa, synthetic construct
  REGION 1..7: note = Description of Artificial Sequence: Synthetic peptide
SSISSNN

SEQ ID NO: 9272 - skipped

SEQ ID NO: 9273 - protein, 11 aa, synthetic construct
  REGION 1..11: note = Description of Artificial Sequence: Synthetic peptide
QQWSSYPYMYT

SEQ ID NO: 9274 - protein, 15 aa, synthetic construct
  REGION 1..15: note = Description of Artificial Sequence: Synthetic peptide
KASQSVSFAGTSLMH

SEQ ID NO: 9275 - protein, 7 aa, synthetic construct
  REGION 1..7: note = Description of Artificial Sequence: Synthetic peptide
RASNLEA

SEQ ID NO: 9276 - protein, 9 aa, synthetic construct
  REGION 1..9: note = Description of Artificial Sequence: Synthetic peptide
QQSREYPYT

SEQ ID NO: 9277 - protein, 11 aa, synthetic construct
  REGION 1..11: note = Description of Artificial Sequence: Synthetic peptide
RTSENIFSYLA

SEQ ID NO: 9278 - protein, 7 aa, synthetic construct
  REGION 1..7: note = Description of Artificial Sequence: Synthetic peptide
NAKTLAE

SEQ ID NO: 9279 - protein, 9 aa, synthetic construct
  REGION 1..9: note = Description of Artificial Sequence: Synthetic peptide
QHHYAFPWT

SEQ ID NO: 9280 - protein, 16 aa, synthetic construct
  REGION 1..16: note = Description of Artificial Sequence: Synthetic peptide
RSSQSLVHSNGNTYLH

SEQ ID NO: 9281 - protein, 7 aa, synthetic construct
  REGION 1..7: note = Description of Artificial Sequence: Synthetic peptide
KVSNRFS

SEQ ID NO: 9282 - protein, 9 aa, synthetic construct
  REGION 1..9: note = Description of Artificial Sequence: Synthetic peptide
SQNTHVPPT

SEQ ID NO: 9283 - protein, 12 aa, synthetic construct
  REGION 1..12: note = Description of Artificial Sequence: Synthetic peptide
RAVQSVSSSYLA

SEQ ID NO: 9284 - protein, 8 aa, synthetic construct
  REGION 1..8: note = Description of Artificial Sequence: Synthetic peptide
QQYGSSPT

SEQ ID NO: 9285 - protein, 12 aa, synthetic construct
  REGION 1..12: note = Description of Artificial Sequence: Synthetic peptide
RASQSVSSSYLA

SEQ ID NO: 9286 - protein, 16 aa, synthetic construct
  REGION 1..16: note = Description of Artificial Sequence: Synthetic peptide
RSSQSLVHSDGNTYLS

SEQ ID NO: 9287 - protein, 7 aa, synthetic construct
  REGION 1..7: note = Description of Artificial Sequence: Synthetic peptide
RISRRFS

SEQ ID NO: 9288 - protein, 9 aa, synthetic construct
  REGION 1..9: note = Description of Artificial Sequence: Synthetic peptide
MQSTHVPRT

SEQ ID NO: 9289 - protein, 6 aa, synthetic construct
  REGION 1..6: note = Description of Artificial Sequence: Synthetic peptide
QSIGTN

SEQ ID NO: 9290 - skipped

SEQ ID NO: 9291 - protein, 9 aa, synthetic construct
  REGION 1..9: note = Description of Artificial Sequence: Synthetic peptide
QQNNNWPTT

SEQ ID NO: 9292 - protein, 11 aa, synthetic construct
  REGION 1..11: note = Description of Artificial Sequence: Synthetic peptide
RASQGINNYLN

SEQ ID NO: 9293 - protein, 7 aa, synthetic construct
  REGION 1..7: note = Description of Artificial Sequence: Synthetic peptide
NTNNLQT

SEQ ID NO: 9294 - protein, 8 aa, synthetic construct
  REGION 1..8: note = Description of Artificial Sequence: Synthetic peptide
LQHNSFPT

SEQ ID NO: 9295 - protein, 11 aa, synthetic construct
  REGION 1..11: note = Description of Artificial Sequence: Synthetic peptide
RASQDISSALV

SEQ ID NO: 9296 - protein, 9 aa, synthetic construct
  REGION 1..9: note = Description of Artificial Sequence: Synthetic peptide
QQFNSYPLT

SEQ ID NO: 9297 - protein, 9 aa, synthetic construct
  REGION 1..9: note = Description of Artificial Sequence: Synthetic peptide
HQYGSTPLT

SEQ ID NO: 9298 - protein, 11 aa, synthetic construct
  REGION 1..11: note = Description of Artificial Sequence: Synthetic peptide
RASQSISSWWA

SEQ ID NO: 9299 - protein, 9 aa, synthetic construct
  REGION 1..9: note = Description of Artificial Sequence: Synthetic peptide
QQYHAHPTT

SEQ ID NO: 9300 - protein, 17 aa, synthetic construct
  REGION 1..17: note = Description of Artificial Sequence: Synthetic peptide
KSSQSVLYSPNNKNYLA

SEQ ID NO: 9301 - protein, 9 aa, synthetic construct
  REGION 1..9: note = Description of Artificial Sequence: Synthetic peptide
QQYYGSPIT

SEQ ID NO: 9302 - protein, 11 aa, synthetic construct
  REGION 1..11: note = Description of Artificial Sequence: Synthetic peptide
RASQSVSSNLA

SEQ ID NO: 9303 - protein, 7 aa, synthetic construct
  REGION 1..7: note = Description of Artificial Sequence: Synthetic peptide
GASTRAT

SEQ ID NO: 9304 - protein, 10 aa, synthetic construct
  REGION 1..10: note = Description of Artificial Sequence: Synthetic peptide
QDYRTWPRRV

SEQ ID NO: 9305 - protein, 16 aa, synthetic construct
  REGION 1..16: note = Description of Artificial Sequence: Synthetic peptide
RSSQNIVHSNGNTYLD

SEQ ID NO: 9306 - protein, 9 aa, synthetic construct
  REGION 1..9: note = Description of Artificial Sequence: Synthetic peptide
FQYSHVPWT

SEQ ID NO: 9307 - protein, 6 aa, synthetic construct
  REGION 1..6: note = Description of Artificial Sequence: Synthetic peptide
QDISNY

SEQ ID NO: 9308 - protein, 9 aa, synthetic construct
  REGION 1..9: note = Description of Artificial Sequence: Synthetic peptide
QHFDHLPLA

SEQ ID NO: 9309 - protein, 11 aa, synthetic construct
  REGION 1..11: note = Description of Artificial Sequence: Synthetic peptide
QSLVHSNGNTY

SEQ ID NO: 9310 - protein, 5 aa, synthetic construct
  REGION 1..5: note = Description of Artificial Sequence: Synthetic peptide
KVSNR

SEQ ID NO: 9311 - protein, 9 aa, synthetic construct
  REGION 1..9: note = Description of Artificial Sequence: Synthetic peptide
SQSTHVPWT

SEQ ID NO: 9312 - protein, 8 aa, synthetic construct
  REGION 1..8: note = Description of Artificial Sequence: Synthetic peptide
SQSTHVLT

SEQ ID NO: 9313 - protein, 11 aa, synthetic construct
  REGION 1..11: note = Description of Artificial Sequence: Synthetic peptide
RASPGIRNYLA

SEQ ID NO: 9314 - protein, 7 aa, synthetic construct
  REGION 1..7: note = Description of Artificial Sequence: Synthetic peptide
AASTLQS

SEQ ID NO: 9315 - protein, 9 aa, synthetic construct
  REGION 1..9: note = Description of Artificial Sequence: Synthetic peptide
QQYNSYPLS

SEQ ID NO: 9316 - protein, 14 aa, synthetic construct
  REGION 1..14: note = Description of Artificial Sequence: Synthetic peptide
GLSSGSVSTSYYPS

SEQ ID NO: 9317 - protein, 7 aa, synthetic construct
  REGION 1..7: note = Description of Artificial Sequence: Synthetic peptide
STNTRSS

SEQ ID NO: 9318 - protein, 10 aa, synthetic construct
  REGION 1..10: note = Description of Artificial Sequence: Synthetic peptide
VLYMGSGQYV

SEQ ID NO: 9319 - protein, 6 aa, synthetic construct
  REGION 1..6: note = Description of Artificial Sequence: Synthetic peptide
QDVNTA

SEQ ID NO: 9320 - skipped

SEQ ID NO: 9321 - protein, 9 aa, synthetic construct
  REGION 1..9: note = Description of Artificial Sequence: Synthetic peptide
QQHYTTPPT

SEQ ID NO: 9322 - protein, 14 aa, synthetic construct
  REGION 1..14: note = Description of Artificial Sequence: Synthetic peptide
TGSSSNIGAGYGVH

SEQ ID NO: 9323 - protein, 7 aa, synthetic construct
  REGION 1..7: note = Description of Artificial Sequence: Synthetic peptide
GNTNRPS

SEQ ID NO: 9324 - protein, 11 aa, synthetic construct
  REGION 1..11: note = Description of Artificial Sequence: Synthetic peptide
QFYDSSLSGWV

SEQ ID NO: 9325 - protein, 5 aa, synthetic construct
  REGION 1..5: note = Description of Artificial Sequence: Synthetic peptide
DVSIG

SEQ ID NO: 9326 - protein, 9 aa, synthetic construct
  REGION 1..9: note = Description of Artificial Sequence: Synthetic peptide
QQYYIYPYT

SEQ ID NO: 9327 - protein, 14 aa, synthetic construct
  REGION 1..14: note = Description of Artificial Sequence: Synthetic peptide
TGTSSDVGSYNVVS

SEQ ID NO: 9328 - protein, 7 aa, synthetic construct
  REGION 1..7: note = Description of Artificial Sequence: Synthetic peptide
EVSQRPS

SEQ ID NO: 9329 - protein, 11 aa, synthetic construct
  REGION 1..11: note = Description of Artificial Sequence: Synthetic peptide
CSYAGSSIFVI

SEQ ID NO: 9330 - protein, 11 aa, synthetic construct
  REGION 1..11: note = Description of Artificial Sequence: Synthetic peptide
RASQNIATDVA

SEQ ID NO: 9331 - protein, 7 aa, synthetic construct
  REGION 1..7: note = Description of Artificial Sequence: Synthetic peptide
SASFLYS

SEQ ID NO: 9332 - protein, 9 aa, synthetic construct
  REGION 1..9: note = Description of Artificial Sequence: Synthetic peptide
QQSEPEPYT

SEQ ID NO: 9333 - protein, 14 aa, synthetic construct
  REGION 1..14: note = Description of Artificial Sequence: Synthetic peptide
TGTSSDVGGYNFVS

SEQ ID NO: 9334 - protein, 7 aa, synthetic construct
  REGION 1..7: note = Description of Artificial Sequence: Synthetic peptide
DVSDRPS

SEQ ID NO: 9335 - protein, 11 aa, synthetic construct
  REGION 1..11: note = Description of Artificial Sequence: Synthetic peptide
SSYGSSSTHVI

SEQ ID NO: 9336 - protein, 13 aa, synthetic construct
  REGION 1..13: note = Description of Artificial Sequence: Synthetic peptide
SGSSSNIGNNYVS

SEQ ID NO: 9337 - protein, 7 aa, synthetic construct
  REGION 1..7: note = Description of Artificial Sequence: Synthetic peptide
DHTNRPA

SEQ ID NO: 9338 - protein, 11 aa, synthetic construct
  REGION 1..11: note = Description of Artificial Sequence: Synthetic peptide
ASWDYTLSGWV

SEQ ID NO: 9339 - protein, 16 aa, synthetic construct
  REGION 1..16: note = Description of Artificial Sequence: Synthetic peptide
RSSQRIVHSNGNTYLE

SEQ ID NO: 9340 - protein, 9 aa, synthetic construct
  REGION 1..9: note = Description of Artificial Sequence: Synthetic peptide
FQGSHVPFT

SEQ ID NO: 9341 - protein, 9 aa, synthetic construct
  REGION 1..9: note = Description of Artificial Sequence: Synthetic peptide
SSDIGGYNS

SEQ ID NO: 9342 - skipped

SEQ ID NO: 9343 - protein, 11 aa, synthetic construct
  REGION 1..11: note = Description of Artificial Sequence: Synthetic peptide
SSYDIESATPV

SEQ ID NO: 9344 - protein, 9 aa, synthetic construct
  REGION 1..9: note = Description of Artificial Sequence: Synthetic peptide
QQYGSSQYT

SEQ ID NO: 9345 - protein, 10 aa, synthetic construct
  REGION 1..10: note = Description of Artificial Sequence: Synthetic peptide
SASSSVSYMH

SEQ ID NO: 9346 - protein, 9 aa, synthetic construct
  REGION 1..9: note = Description of Artificial Sequence: Synthetic peptide
QQWSKHPLT

SEQ ID NO: 9347 - protein, 12 aa, synthetic construct
  REGION 1..12: note = Description of Artificial Sequence: Synthetic peptide
SASSSVSSSYLY

SEQ ID NO: 9348 - protein, 7 aa, synthetic construct
  REGION 1..7: note = Description of Artificial Sequence: Synthetic peptide
STSNLAS

SEQ ID NO: 9349 - protein, 9 aa, synthetic construct
  REGION 1..9: note = Description of Artificial Sequence: Synthetic peptide
HQWNRYPYT

SEQ ID NO: 9350 - protein, 10 aa, synthetic construct
  REGION 1..10: note = Description of Artificial Sequence: Synthetic peptide
SAHSSVSFMH

SEQ ID NO: 9351 - protein, 7 aa, synthetic construct
  REGION 1..7: note = Description of Artificial Sequence: Synthetic peptide
STSSLAS

SEQ ID NO: 9352 - protein, 9 aa, synthetic construct
  REGION 1..9: note = Description of Artificial Sequence: Synthetic peptide
QQRSSFPLT

SEQ ID NO: 9353 - protein, 17 aa, synthetic construct
  REGION 1..17: note = Description of Artificial Sequence: Synthetic peptide
KSSQSLLYSSNQKIYLA

SEQ ID NO: 9354 - protein, 6 aa, synthetic construct
  REGION 1..6: note = Description of Artificial Sequence: Synthetic peptide
ASTRES

SEQ ID NO: 9355 - protein, 9 aa, synthetic construct
  REGION 1..9: note = Description of Artificial Sequence: Synthetic peptide
QQYYRYPRT

SEQ ID NO: 9356 - protein, 8 aa, synthetic construct
  REGION 1..8: note = Description of Artificial Sequence: Synthetic peptide
QQRSNWPT

SEQ ID NO: 9357 - protein, 7 aa, synthetic construct
  REGION 1..7: note = Description of Artificial Sequence: Synthetic peptide
QRVSSSY

SEQ ID NO: 9358 - protein, 9 aa, synthetic construct
  REGION 1..9: note = Description of Artificial Sequence: Synthetic peptide
QQYGSLPWT

SEQ ID NO: 9359 - protein, 6 aa, synthetic construct
  REGION 1..6: note = Description of Artificial Sequence: Synthetic peptide
QDVSTA

SEQ ID NO: 9360 - protein, 9 aa, synthetic construct
  REGION 1..9: note = Description of Artificial Sequence: Synthetic peptide
QQYLYHPAT

SEQ ID NO: 9361 - protein, 9 aa, synthetic construct
  REGION 1..9: note = Description of Artificial Sequence: Synthetic peptide
SSDVGGYNY

SEQ ID NO: 9362 - skipped

SEQ ID NO: 9363 - protein, 10 aa, synthetic construct
  REGION 1..10: note = Description of Artificial Sequence: Synthetic peptide
SSYTSSSTRV

SEQ ID NO: 9364 - protein, 11 aa, synthetic construct
  REGION 1..11: note = Description of Artificial Sequence: Synthetic peptide
KASQDVGTAVD

SEQ ID NO: 9365 - protein, 7 aa, synthetic construct
  REGION 1..7: note = Description of Artificial Sequence: Synthetic peptide
WASTRHT

SEQ ID NO: 9366 - protein, 6 aa, synthetic construct
  REGION 1..6: note = Description of Artificial Sequence: Synthetic peptide
QNVDTN

SEQ ID NO: 9367 - protein, 9 aa, synthetic construct
  REGION 1..9: note = Description of Artificial Sequence: Synthetic peptide
QQYDSYPYT

SEQ ID NO: 9368 - protein, 12 aa, synthetic construct
  REGION 1..12: note = Description of Artificial Sequence: Synthetic peptide
TLSSAHKTDTID

SEQ ID NO: 9369 - protein, 7 aa, synthetic construct
  REGION 1..7: note = Description of Artificial Sequence: Synthetic peptide
GSYTKRP

SEQ ID NO: 9370 - protein, 9 aa, synthetic construct
  REGION 1..9: note = Description of Artificial Sequence: Synthetic peptide
GADYIGGYV

SEQ ID NO: 9371 - protein, 11 aa, synthetic construct
  REGION 1..11: note = Description of Artificial Sequence: Synthetic peptide
KASPDINSYLS

SEQ ID NO: 9372 - protein, 7 aa, synthetic construct
  REGION 1..7: note = Description of Artificial Sequence: Synthetic peptide
RANRLVD

SEQ ID NO: 9373 - protein, 9 aa, synthetic construct
  REGION 1..9: note = Description of Artificial Sequence: Synthetic peptide
LQYDEFPYT

SEQ ID NO: 9374 - protein, 11 aa, synthetic construct
  REGION 1..11: note = Description of Artificial Sequence: Synthetic peptide
QASQSIGSYLA

SEQ ID NO: 9375 - protein, 7 aa, synthetic construct
  REGION 1..7: note = Description of Artificial Sequence: Synthetic peptide
YASNLAS

SEQ ID NO: 9376 - protein, 10 aa, synthetic construct
  REGION 1..10: note = Description of Artificial Sequence: Synthetic peptide
LGSLSNSDNV

SEQ ID NO: 9377 - protein, 11 aa, synthetic construct
  REGION 1..11: note = Description of Artificial Sequence: Synthetic peptide
QASQSIDSNLA

SEQ ID NO: 9378 - protein, 7 aa, synthetic construct
  REGION 1..7: note = Description of Artificial Sequence: Synthetic peptide
RASNLAS

SEQ ID NO: 9379 - protein, 12 aa, synthetic construct
  REGION 1..12: note = Description of Artificial Sequence: Synthetic peptide
LGGVGNVSYRTS

SEQ ID NO: 9380 - protein, 14 aa, synthetic construct
  REGION 1..14: note = Description of Artificial Sequence: Synthetic peptide
QSLLYSGNQKNYLA

SEQ ID NO: 9381 - protein, 7 aa, synthetic construct
  REGION 1..7: note = Description of Artificial Sequence: Synthetic peptide
WASARES

SEQ ID NO: 9382 - protein, 11 aa, synthetic construct
  REGION 1..11: note = Description of Artificial Sequence: Synthetic peptide
KASQSVSNDVA

SEQ ID NO: 9383 - protein, 7 aa, synthetic construct
  REGION 1..7: note = Description of Artificial Sequence: Synthetic peptide
FATNRYT

SEQ ID NO: 9384 - protein, 9 aa, synthetic construct
  REGION 1..9: note = Description of Artificial Sequence: Synthetic peptide
QQDYSSPWT

SEQ ID NO: 9385 - protein, 12 aa, synthetic construct
  REGION 1..12: note = Description of Artificial Sequence: Synthetic peptide
TASSSVNSNYLH

SEQ ID NO: 9386 - protein, 9 aa, synthetic construct
  REGION 1..9: note = Description of Artificial Sequence: Synthetic peptide
HQYHRSPLT

SEQ ID NO: 9387 - protein, 11 aa, synthetic construct
  REGION 1..11: note = Description of Artificial Sequence: Synthetic peptide
KASQDVDTAVA

SEQ ID NO: 9388 - protein, 7 aa, synthetic construct
  REGION 1..7: note = Description of Artificial Sequence: Synthetic peptide
WASTRLT

SEQ ID NO: 9389 - protein, 9 aa, synthetic construct
  REGION 1..9: note = Description of Artificial Sequence: Synthetic peptide
QQYSSYPYT

SEQ ID NO: 9390 - protein, 12 aa, synthetic construct
  REGION 1..12: note = Description of Artificial Sequence: Synthetic peptide
KASQDVSIAVAW

SEQ ID NO: 9391 - protein, 7 aa, synthetic construct
  REGION 1..7: note = Description of Artificial Sequence: Synthetic peptide
SASYRYT

SEQ ID NO: 9392 - protein, 9 aa, synthetic construct
  REGION 1..9: note = Description of Artificial Sequence: Synthetic peptide
QQHYITPLT

SEQ ID NO: 9393 - protein, 9 aa, synthetic construct
  REGION 1..9: note = Description of Artificial Sequence: Synthetic peptide
QQYGSSPLT

SEQ ID NO: 9394 - protein, 8 aa, synthetic construct
  REGION 1..8: note = Description of Artificial Sequence: Synthetic peptide
RASQGIDN

SEQ ID NO: 9395 - protein, 7 aa, synthetic construct
  REGION 1..7: note = Description of Artificial Sequence: Synthetic peptide
DASNLDT

SEQ ID NO: 9396 - protein, 9 aa, synthetic construct
  REGION 1..9: note = Description of Artificial Sequence: Synthetic peptide
QQAKAFPPT

SEQ ID NO: 9397 - protein, 6 aa, synthetic construct
  REGION 1..6: note = Description of Artificial Sequence: Synthetic peptide
QDIAGS

SEQ ID NO: 9398 - protein, 9 aa, synthetic construct
  REGION 1..9: note = Description of Artificial Sequence: Synthetic peptide
LQYGSFPPT

SEQ ID NO: 9399 - skipped

What is claimed is:

1. A polypeptide, comprising an extended recombinant polypeptide (XTEN) which:
is from 150 to 1000 amino acids in length, at least 90% of which amino acids are glycine (G), alanine (A), serine (S), threonine (T), glutamate (E) or proline (P);
comprises at least two times of a sequence motif selected from the group consisting of SEQ ID NOs: 182-203 and 1715-1722; and
comprises a barcode fragment that occurs only once within the polypeptide and is located between 10 and 200 from the N-terminus or the C-terminus of the polypeptide,
wherein the polypeptide further comprises a reference fragment that is further away, than the barcode fragment, from the N-terminus or the C-terminus of the polypeptide.

2. The polypeptide of claim 1, wherein the barcode fragment is between 4 and 20 amino acids in length.

3. The polypeptide of claim 2, wherein the barcode fragment has a glutamic acid at the C-terminus.

4. The polypeptide of 3, wherein the barcode fragment has an N-terminal amino acid that is immediately preceded by a glutamic acid residue.

5. The polypeptide of claim 3, wherein the barcode fragment consists of an amino acid sequence selected from the group consisting of SEQ ID NOs: 8020-8030.

6. The polypeptide of claim 5, wherein the barcode fragment consists of the amino acid sequence of SEQ ID NO: 8029.

7. The polypeptide of claim 3, wherein the barcode fragment is located between 40 and 150 from the N-terminus or the C-terminus of the polypeptide.

8. The polypeptide of claim 3, wherein the barcode fragment can be released from the polypeptide by a protease.

9. The polypeptide of claim 1, further comprising a biologically active polypeptide.

10. A mixture comprising a plurality of polypeptides of varying lengths each of which is derived from the polypeptide of claim 1 with or without truncation, the plurality of polypeptides comprising:
a first set of polypeptides, each retaining the barcode fragment and the reference fragment; and
a second set of polypeptides, each retaining the reference fragment but lacking the barcode fragment.

11. A nucleic acid comprising a polynucleotide encoding a polypeptide of claim 1 or the reverse complement of the polynucleotide thereof.

12. An expression vector comprising the polynucleotide sequence of claim 11 and a regulatory sequence operably linked to the polynucleotide sequence.

13. A host cell comprising the expression vector of claim 12.

14. A host cell comprising the polypeptide of claim 1.

15. A host cell comprising the mixture of claim 10.

16. A pharmaceutical composition comprising the polypeptide of claim 1 and one or more pharmaceutically acceptable excipients.
